United States Patent Application Publication US 2026/0297607 A1, published October 1, 2026 (application 19/478,311).

The application's sequence listing, which the Patent Office published only in electronic form, follows.

SEQUENCE LISTING (635 sequences)

SEQ ID NO: 1 - DNA, 134 bp, Tobacco mosaic virus
  source 1..134: mol_type = other DNA
taggtttgagagagaagattacaaacgtgagagacggagggcccatggaacttacagaagaagtcgttgatgagttcatggaagatgtccctatgtcgatcaggcttgcaaagtttcgatctcgaaccggaaaa

SEQ ID NO: 2 - DNA, 198 bp, Tobacco mild green mosaic virus
  source 1..198: mol_type = other DNA
aaggtttgagggaacgtattttgagtgtgacagacggctcgccaattgaactcactgaaaaggttgttgaggagttcgtggatgaagtaccaatggctgtgaaactcgaaaaggttccggaaaacaaaaaagaaatggtaggtaataatgttaataataagaaaataaataacagtggtaagaagggttttaaaattg

SEQ ID NO: 3 - DNA, 133 bp, Tomato mosaic virus
  source 1..133: mol_type = other DNA
tgggtttgagggagaaagtaacgagtgtgaacgatggaggacccatggaactttcagaagaagttgttgatgagttcatggagaatgttccaatgtcggttagactcgcaaagtttcgaaccaaatcctcaaa

SEQ ID NO: 4 - DNA, 134 bp, Pepper mild mottle virus
  source 1..134: mol_type = other DNA
taggcttgagagagaaaattactagtgtgtcagaaggaggacccgttgaacttacagaagcagtcgttgatgagttcatcgaatcagttccaatggctgacagattacgtaaatttcgcaatcaatctaagaaa

SEQ ID NO: 5 - DNA, 139 bp, Paprika mild mottle virus
  source 1..139: mol_type = other DNA
aaggtttacgagagaaagtgactacagtgtcagaggacagcgctattgaacttacagaggaagttgttgatgagttcatagaggcagtaccgatggcacgtcggttgcaaaatttcaggaaacccaaaaataatattag

SEQ ID NO: 6 - DNA, 134 bp, Bell pepper mottle virus
  source 1..134: mol_type = other DNA
tgggtttgagggagaagattacaagagtaaccgacgccgggcctatggaacttactgaagaagttgttgatgagttcatagagaatgtcccgatggcggcaaggcttgcaagatttcgaaccaaatcctcaaaa

SEQ ID NO: 7 - DNA, 138 bp, Tomato mottle mosaic virus
  source 1..138: mol_type = other DNA
tgggtttgagggagaagattacaagagtggatgacgcaggtcccattgaacttaccgaagaagttgttgatgagttcatggagagtgtgcctatgtcagtcaggcttgctaaatttcgaaccaaatcctcaaaaagag

SEQ ID NO: 8 - DNA, 135 bp, Odontoglossum ringspot virus
  source 1..135: mol_type = other DNA
tcggactgagagagaagattttgaacgtaacagaaggagggcccaccgaacttactgaagcagttgttgatagattcgtggagaaagttcctatggctgctaggctcaagtcttttcgctctgtcaacaaaaaga

SEQ ID NO: 9 - DNA, 201 bp, Obuda pepper virus
  source 1..201: mol_type = other DNA
agggtctaagagagaaggtgactgccgtgtccgaagacgacgctatagaactcacagaagaggttgttgatgagtttatagaagccgtaccgatggcgcgacgtttgcagaacttgagaaaacccaagtacaacaaagaaaaagaaaataaaaatttgaataataaaaatagtataggagtttccaaacctgtcggtttag

SEQ ID NO: 10 - DNA, 136 bp, Rehmannia mosaic virus
  source 1..136: mol_type = other DNA
tgggtttgagggagaaaatcacaactgtgaaagatggaggacccatggaactcaccgaagaagtggtagacgagttcatggaagacgttccaatgtctgtcagacttgcgaagtttcgatctcgaaccggaaaaaa

SEQ ID NO: 11 - DNA, 134 bp, Brugmansia mild mottle virus
  source 1..134: mol_type = other DNA
aaggattgcgtgaaaggatcacgaatgttgccgaaggcggttcacttgagctcactgaagaagttgttgagagctttgtgaatgacgtccctatggcagtacgactgaaccatttacgtaatggaaacaaaaaa

SEQ ID NO: 12 - DNA, 134 bp, Yellow tailflower mild mottle virus
  source 1..134: mol_type = other DNA
ccggtctgagagagaaagtaacttccgtgtcagaagggtctccgattgaactcacagaagatgttgtagatgagtttttcgagagtgtccctatggctcgtaggttgcagaacttgaggaataggcgaggaaat

SEQ ID NO: 13 - DNA, 137 bp, Tropical soda apple mosaic virus
  source 1..137: mol_type = other DNA
ttggactgagggagaaaattacaaatgtctcagacggaggacccgtcgaacttacagaagaagttgttgatgagttcgtcgaatcagttcctatggctgagagattacgtaaatttcgaggacggtccaacaaaaag

SEQ ID NO: 14 - DNA, 432 bp, Cucumber green mottle mosaic virus
  source 1..432: mol_type = other DNA
taccctcgtctgtcgtagatattaattctagattcccagatgcgggtttttacgctttcctcaacggtcctgtgttgaggcctatcttcgtttcgcttctcagctccacggatacgcgtaatagggtcattgaggttgtagatcctagcaatcctacgactgctgagtcgcttaacgctgtaaagcgtactgatgacgcgtctacagccgctagggccgagatagataatttaatagagtctatttctaagggttttgatgtttacgatagggcttcatttgaagccgcgttttcggtagtctggtcagaggctaccacctcgaaagcttagtttcgagggtcttctgatggtggtgcacaccaaagtgcatagtgctttcccgttcacttaaatcgaacggtttgctcattggtttgcggaaacctctcac

SEQ ID NO: 15 - DNA, 347 bp, Cucumber fruit mottle mosaic virus
  source 1..347: mol_type = other DNA
tttttgtccttattatgctttgtatgatctgttggtgtcagcccaaggtggagccctgcaaacgcaaaatggtaaagacattttgcgtgactccataaatgggttgttaacgacagttgcgtctcctaggagtcggttccctgcggaagggttctttgtctggtcccgtgagtcgcgcattgctgctatattagattctctgctttcggcgttggattcaagaaatagggctattgaagttgaaaacccttctaatccttcgaccagtgaagctttgaatgctactaagcgcaatgacgacgcgtctactgctgcgcacaacgacattcctcagctgatttcagctt

SEQ ID NO: 16 - DNA, 297 bp, Kyuri green mottle mosaic virus
  source 1..297: mol_type = other DNA
tgttaacttctgttgcgtctctcaattcacgttttcctgctaatgagtttttcgtgtggtctcgtgagtcgcgcattgctgccataatcgattcgttgttatccgctttggattctagaaatagggctatcgaagttgaaaacccttctaatccttctaccggagaagctctgaatgcgaccaagcgcaatgacgacgcgtctacagccgcgcacaacgacattcctctgcttttagcagctctgaatgacggtgtgggcgtttttgatagtgcgtcttttgagtcagctttcggtc

SEQ ID NO: 17 - DNA, 335 bp, Zucchini green mottle mosaic virus
  source 1..335: mol_type = other DNA
tgctgtcttctgttgcgtcacccacttcacagtttccttccggtgtgttttatgtgtggtctcgtgagtcgcgcattgctgctttgatcgattctctcttcggtgctttggattcaagaaatagggctattgaagttgaaaacccttctaatccatcgactggcgaagctttgaacgcggttaagcgcaatgacgacgcgtctacagccgctcacaacgacattcctcagattttatctgctctgaatgaaggtgcgggcgtttttgatagagcgtcttttgaatctgcttttggtctcgtgtggaccgcaggttcgtctacctcgtcttgaggc

SEQ ID NO: 18 - DNA, 238 bp, Cucumber mottle virus
  source 1..238: mol_type = other DNA
tcttttcctcgcccgtgagtcctaccgtcagatttcctgacggagttttttatgtgtttttaggtaatcctgttttggatccgctttttaaagctctgttacagtcgttggatacaagaaatagggtcatagaggttgataacccttctaatcctacgactgctgagtctttaaacgctgtccagcgtactgacgattctactgtcagttcgcgtgtgggtttaataaacttgcgtgc

SEQ ID NO: 19 - DNA, 238 bp, unidentified
  source 1..238: mol_type = other DNA
ttttcacctctcctgtgagtccgaccgttagatttcctgacggtccgtttttcattttcttagggaatcctgtgttggatccgctttttaaagctcttctgcagtcgctggatacaagaaatagggttattgaggttgacaatccttctaatcctactactgcggaatctttgaacgcgattcagcgtactgacgactcttccgtcagttcgcatgtcggtctagttaaccttcgcgc

SEQ ID NO: 20 - DNA, 246 bp, Turnip vein-clearing virus
  source 1..246: mol_type = other DNA
agggtttgagggaaaaggtcgtcgcaataaatgatccggacgtcgaaggtttcgaaggtgtggttgacgaattcgtcgattcggttgcagcatttaaagcggttgacaatttcaggaagaggaaaaagaaggttgaagaaagggatgtagtaagtaagtataaatatagaccggagaaatacgccggtcctgattcgtttaatttaaaagaagaaaatgtcttacaacattacaaacccgaatcag

SEQ ID NO: 21 - DNA, 246 bp, Ribgrass mosaic virus
  source 1..246: mol_type = other DNA
agggtttgagagaaaagatcatcgcgataagtgatccggacgtcgaaggtttcgaaggagtggttgacgatttcgttgattcggtcgaagcatttagagcggttgataatttcaggaaaaagaaaaggaagataggagaaaaggaagcggtaagtaggaataagtacagaccggagaaacacgccggtcctaattcgttatatattaaagaagaaaatgtcttacaacatcacgagctcgaatcag

SEQ ID NO: 22 - DNA, 246 bp, Wasabi mottle virus
  source 1..246: mol_type = other DNA
agggtttaagagaaagagtcatcgctgtagatgatccgaacgttgagggtttcgaaggtgtagttgacgaattcatcgattcggttgcagcatttaaagcggttgacaatttcaggaaaaagaaaaggaagattggaggaagggatgtgattagtaagtataagtatagaccagagaagtacgccggtcctgattcgttacttaataaagaagaaaatgtcatacaacatcacgaactcgaatcag

SEQ ID NO: 23 - DNA, 249 bp, Youcai mosaic virus
  source 1..249: mol_type = other DNA
aaggtttgagggaaaaagtcatcgctgtgaatgatccgaacgtcgaaggtttcgaaggtgtggttgacgatttcgtcgattcggttgctgcattcaaggcgattgacagtttcaggaagaaaaagaaaaggattggaggaagggatgtaaatagtaataagtatagatatagaccggagagatacgccggtcctgattcgttacaatataaagaagaaaatggtttacaacatcacgagctcgaatcag

SEQ ID NO: 24 - DNA, 258 bp, Streptocarpus flower break virus
  source 1..258: mol_type = other DNA
agggtttgcgtgaaaggcttaataatgtgggagatccaaatgttgaagtttcagaagttgtcgttgatgagttcgtggactcgatttccgcttcacagtcgttaagccgtgctcgtaataaatacgttcgtggtaatggtaaggttgggaataatagtggtggttttagtaagtataatcgtcatcagccggagaggttcgccggcaaggctatgtataattctaaaaatgtcgtacgtggtggtacttccgaaccaa

SEQ ID NO: 25 - DNA, 333 bp, Rattail cactus necrosis-associated virus
  source 1..333: mol_type = other DNA
tgcttttatgacaggatcttacccaacaattcgactgtgctcaacgactatgacagtttcaccttgagagtgagagacattcatctcaacttggacgattgtagactcgacctgtcaaaggacgatccagcaatctgtcggaggcagtcgggttatctgcgtcccgttcttagaaccggtacggagagacctcgacagcccgggctcattgagaatgtcttagctcttatcaagagaaatttcaatgcacctcatcttcttggaactgtagacgtcgatgcaatggccgacaccgtagtggataagttttttaaaattttcttccctgatggt

SEQ ID NO: 26 - protein, 159 aa, Tobacco mosaic virus
MSYSITTPSQFVFLSSAWADPIELINLCTNALGNQFQTQQARTVVQRQFSEVWKPSPQVTVRFPDSDFKVYRYNAVLDPLVTALLGAFDTRNRIIEVENQANPTTAETLDATRRVDDATVAIRSAINNLIVELIRGTGSYNRSSFESSSGLVWTSGPAT

SEQ ID NO: 27 - protein, 159 aa, Tobacco mild green mosaic virus
MPYTINSPSQFVYLSSAYADPVQLINLCTNALGNQFQTQQARTTVQQQFADAWKPVPSMTVRFPASDFYVYRYNSTLDPLITALLNSFDTRNRIIEVDNQPAPNTTEIVNATQRVDDATVAIRASINNLANELVRGTGMFNQAGFETASGLVWTTTPAT

SEQ ID NO: 28 - protein, 159 aa, Tomato mosaic virus
MSYSITSPSQFVFLSSVWADPIELLNVCTNSLGNQFQTQQARTTVQQQFSEVWKPFPQSTVRFPGDVYKVYRYNAVLDPLITALLGAFDTRNRIIEVENQQSPTTAETLDATRRVDDATVAIRSAINNLVNELVRGTGLYNQNTFESMSGLVWTSAPAS

SEQ ID NO: 29 - protein, 157 aa, Pepper mild mottle virus
MAYTVSSANQLVYLGSVWADPLELQNLCTSALGNQFQTQQARTTVQQQFSDVWKTIPTATVRFPATGFKVFRYNAVLDSLVSALLGAFDTRNRIIEVENPQNPTTAETLDATRRVDDATVAIRASISNLMNELVRGTGMYNQALFESASGLTWATTP

SEQ ID NO: 30 - protein, 161 aa, Paprika mild mottle virus
MPYTVSSPNQLVYFGSVWADPIALIDLCTVSLGNQFQTQNARTTVQQQFSDLFKTVPTRTIRFSDGENGFRVFRYNSTLDPLITALLNSFDTRNRIIETENPANPNTAEIASATQRVDDATVSIRACINNLMNELARGTGMLNTASFETVSNLTWTTAATT

SEQ ID NO: 31 - protein, 160 aa, Bell pepper mottle virus
MSYTVNSPSQLVYLSSAWADPTDLLNLCTNSLGNQFQTQQARTTVQQQFSDVWKPTPQAGVRFPASGFKVYRYNAVLDPLITALLGTFDTRNRIIEVENQQNPTTAETLDATRRVDDATVAIRSAINNLANELVRGTGMYNQTSFESMAGLTWTTTPPSG

SEQ ID NO: 32 - protein, 159 aa, Tomato mottle mosaic virus [sequence omitted]

SEQ ID NO: 33 - protein, 158 aa, Odontoglossum ringspot virus
MSYTITDPSKLAYLSSAWADPNSLINLCTNSLGNQFQTQQARTTVQQQFADVWQPVPTLTSRFPAGAGHFRVYRYELILEPLITFLMGTFDTRNRIIEVRNPQNPTTTETLDATRRVDDATVAIRSAINNLLNELVRGNGMYNQVSFETMSGLTWTSS

SEQ ID NO: 34 - protein, 161 aa, Obuda pepper virus
MPYTVTSPSQLVYFGSVWADPITFIDLCTVALGNQFQTQNARTTVQQQFSDLFKTVPTRTNRFNDGENGFRVFRYNSTLDPLISALMNSFDTRNRIIEVDNPANPNTSEVASATQRVDDATVNIRACINNLMNELVRGTGMMNTASFETVSNLTWTTTTTT

SEQ ID NO: 35 - protein, 159 aa, Rehmannia mosaic virus
MSYTIATPSQFVYLSSAWADPVELINLCTNALGNQFQTQQARTVVQRQFSEVWKPSPQVTVRFPANDFKVYRYNAVLDPLVTALLGAFDTRNRIIEVENQANPTTAETLDATRRVDDATVAIRSAINNLVVELIRGTGSYNRSAFESSSGLVWTSGPAT

SEQ ID NO: 36 - protein, 159 aa, Brugmansia mild mottle virus
MAYTITAPNQIVYLGVAYADPILLMNLCTTSQGNQFQTQNARTTVQQQFADIWKAVPAVNIRFPENGFLVYRYNAVLDQLVTSLLNSFDTRNRIIEVENPPNPTNGEIMSATQRVDDATVNIRASITNLMNELVRGTGFLNRSSFESTSGLTWSTAPTT

SEQ ID NO: 37 - protein, 158 aa, Yellow tailflower mild mottle virus
MSYAITSPKQFAYLTNAYADPIALISLCNNALGNQFQTQNARTTVQQQFNDIWKELPTQISRFPVGIYRVYRFDSTIDPLITSVLNSFDTRNRIIETENPANPSTTEVVNATQRVDDATVNIRSSINNLCNELIRGTGFLNQATFEEASQLTWTARTT

SEQ ID NO: 38 - protein, 160 aa, Tropical soda apple mosaic virus
MSYTISNPNQLVYLASVWADPTELLNLCTSALGNQFQTQQARTTVQQQFSDVWKTVPATNIRFPNAGFKVYRYNAVLDSLITALLGSFDTRNRIIEVENPQNPTTAETLDATRRVDDATVAIRSSINNLMNELVRGTGMYNQAQFESVSGLTWATTATSS

SEQ ID NO: 39 - protein, 161 aa, Cucumber green mottle mosaic virus
MAYNPITPSKLIAFSASYVPVRTLLNFLVASQGTAFQTQAGRDSFRESLSALPSSVVDINSRFPDAGFYAFLNGPVLRPIFVSLLSSTDTRNRVIEVVDPSNPTTAESLNAVKRTDDASTAARAEIDNLIESISKGFDVYDRASFEAAFSVVWSEATTSKA

SEQ ID NO: 40 - protein, 162 aa, Cucumber fruit mottle mosaic virus
MSYSTSGLRSLPAYTKSFCPYYALYDLLVSAQGGALQTQNGKDILRDSINGLLTTVASPRSRFPAEGFFVWSRESRIAAILDSLLSALDSRNRAIEVENPSNPSTSEALNATKRNDDASTAAHNDIPQLISALNDGAGVFDRASFESQFGLVWTAASSSTSK

SEQ ID NO: 41 - protein, 161 aa, Kyuri green mottle mosaic virus
MSYSTSGIRSLPAFAKSFYPFYDVYNLLVSAQGGALQTQNGKDILRESLTGLLTSVASLNSRFPANEFFVWSRESRIAAIIDSLLSALDSRNRAIEVENPSNPSTGEALNATKRNDDASTAAHNDIPLLLAALNDGVGVFDSASFESAFGLTWTASATSSK

SEQ ID NO: 42 - protein, 161 aa, Zucchini green mottle mosaic virus
MPYSTSGIRSLPAFSKSFFPYLELYNLLITNQGAALQTQNGKDILRESLVGLLSSVASPTSQFPSGVFYVWSRESRIAALIDSLFGALDSRNRAIEVENPSNPSTGEALNAVKRNDDASTAAHNDIPQILSALNEGAGVFDRASFESAFGLVWTAGSSTSS

SEQ ID NO: 43 - protein, 162 aa, Cucumber mottle virus
MAYSPITPTNLSLFSSNYVPFTEFYNYLVTAQGEAFQTQQGRDSVRDSLSGFFSSPVSPTVRFPDGVFYVFLGNPVLDPLFKALLQSLDTRNRVIEVDNPSNPTTAESLNAVQRTDDSTVSSRVGLINLRAAITQGNGVVNRSIFESSNGLTWATSGSSSSK

SEQ ID NO: 44 - protein, 162 aa, unidentified
MAYTPITPTNLPLFSSNYVPYTEFYNYLVSAQGEAFQTQQGRDAVRTTLSGFFTSPVSPTVRFPDGPFFIFLGNPVLDPLFKALLQSLDTRNRVIEVDNPSNPTTAESLNAIQRTDDSSVSSHVGLVNLRAAIAQGNGVVNRSIFESSSGLTWATSSASTSK

SEQ ID NO: 45 - protein, 157 aa, Turnip vein-clearing virus
MSYNITNPNQYQYFAAVWAEPIPMLNQCMSALSQSYQTQAARDTVRQQFSNLLSAVVTPSQRFPDTGSRVYVNSAVIKPLYEALMKSFDTRNRIIETEEESRPSASEVANATQRVDDATVAIRSQIQLLLSELSNGHGYMNRAEFEALLPWTTAPAT

SEQ ID NO: 46 - protein, 157 aa, Ribgrass mosaic virus
MSYNITSSNQYQYFAAVWAEPTPMLNQCVSALSQSFQTQAGRDTVRQQFSNLLSAIVAPNQRFPDTGFRVYVNSAVIKPLYEALMKSFDTKNRIIETEEESRPSASEVANATQRVDDATVAIRSQIQLLLNELSNGHGYMNRAEFEAILPWTTAPAT

SEQ ID NO: 47 - protein, 157 aa, Wasabi mottle virus
MSYNITNSNQYQFFAAVWAEPIAMLNQCISALSQSYQTQAARDTVRQQFSNLLSAIVTPNQRFPETGYRVYVNSAVLKPLYEALMKSFDTRNRIIETEEESRPSASEVANATQRVDDATVAIRSQIQLLLSELSSGHGLMNRAEFEVLIPWATAPAK

SEQ ID NO: 48 - protein, 157 aa, Youcai mosaic virus
MVYNITSSNQYQYFAAMWAEPTAMLNQCVSALSQSYQTQAARDTVRQQFSNLLSAIVTPNQRFPEAGYRVYINSAVLKPLYESLMKSFDTRNRIIETEEESRPSASEVANATQRVDDATVAIRSQIQLLLNELSNGHGLMNRAEFEVLLPWATAPAT

SEQ ID NO: 49 - protein, 157 aa, Streptocarpus flower break virus
MSYVVVLPNQLQFFTNAWADPIQLMNLCSASLSQIFQTQAARDAVREQFGNTLRSVVTQTTRFPEAGFQVYINDAALKPLWENLLKSFDTKNRILETEEETRPSTAEVLNATQRVDDSTTAIRGALQRLSDELNRGSGYMNRTSFETILLWSAATAK

SEQ ID NO: 50 - protein, 170 aa, Rattail cactus necrosis-associated virus
MPYINVQPKDFVYLTRSWVDPQRLIQFLSDMQTQAFQAQQSRTQLLNELSTMVVYGPTKSDRFPIDTYLINITKGGLSAYWFGLTQSADTKDRVFEVSEARAVTNAESKLATQRVDDATVAIRNAIKSTLSYLIAGEDIYSRTSFEAALGWIWQENLPPPPQTAASDSRT

SEQ ID NO: 51 - protein, 268 aa, Tobacco mosaic virus
MALVVKGKVNINEFIDLTKMEKILPSMFTPVKSVMCSKVDKIMVHENESLSEVNLLKGVKLIDSGYVCLAGLVVTGEWNLPDNCRGGVSVCLVDKRMERADEATLGSYYTAAAKKRFQFKVVPNYAITTQDAMKNVWQVLVNIRNVKMSAGFCPLSLEFVSVCIVYRNNIKLGLREKITNVRDGGPMELTEEVVDEFMEDVPMSIRLAKFRSRTGKKSDVRKGKNSSNDRSVPNKNYRNVKDFGGMSFKKNNLIDDDSEATVAESDSF

SEQ ID NO: 52 - protein, 256 aa, Tobacco mild green mosaic virus
MAVSLRDTVKISEFIDLSKQDEILPAFMTKVKSVRISTVDKIMAVKNDSLSDVDLLKGVKLVKKGYVCLADLVVSGEWNLPDNCRGGVSVCIVDKRMKRSKEATLGAYHAPACKKNFSFKLIPNYSITSEDAEKHPWQVLVNIKGVAMEEGYCPLSLEFVSICVVHKNNVRKGLRERILSVTDGSPIELTEKVVEEFVDEVPMAVKLEKVPENKKEMVGNNVNNKKINNSGKKGFKIEEIEDNVSDDESIASSSTF

SEQ ID NO: 53 - protein, 264 aa, Tomato mosaic virus
MALVVKGKVNINEFIDLSKSEKLLPSMFTPVKSVMVSKVDKIMVHENESLSEVNLLKGVKLIEGGYVCLVGLVVSGEWNLPDNCRGGVSVCMVDKRMERADEATLGSYYTAAAKKRFQFKVVPNYGITTKDAEKNIWQVLVNIKNVKMSAGYCPLSLEFVSVCIVYKNNIKLGLREKVTSVNDGGPMELSEEVVDEFMENVPMSVRLAKFRTKSSKRGPKNNNNLGKGRSGGRSKPKSFDEVEKEFDNLIEDEAETSVADSDSY

SEQ ID NO: 54 - protein, 257 aa, Pepper mild mottle virus
MALVVKDDVKISEFINLSAAEKFLPAVMTSVKTVRISKVDKVIAMENDSLSDVNLLKGVKLVKDGYVCLAGLVVSGEWNLPDNCRGGVSVCLVDKRMQRDDEATLGSYRTSAAKKRFAFKLIPNYSITTADAERKVWQVLVNIRGVAMEKGFCPLSLEFVSVCIVHKSNIKLGLREKITSVSEGGPVELTEAVVDEFIESVPMADRLRKFRNQSKKGSNKYVGKRNDNKGLNKEGKLFDKVRIGQNSESSDAESSSF

SEQ ID NO: 55 - protein, 269 aa, Paprika mild mottle virus
MSSKSIVNIEEFINMSKAEEVLPAALTRMKSVRISTVDKIMATDNDNISEVDLLKGVKLIKNGYVCLVGLVVSGEWNLPDNCRGGVSVCLIDKRMQRHNEATLGSYTAKASKKNFSFKLIPNYSITSQDAERRPWEVMVNIRGVAMEEGWCPLSLEFVSVCIVHKNNVRKGLREKVTTVSEDSAIELTEEVVDEFIEAVPMARRLQNFRKPKNNISKNFVNKGSSKPRNIPKLNEDKVFKLEKGLKGVKGMTNASRDDSSSEISSDSFN

SEQ ID NO: 56 - protein, 278 aa, Bell pepper mottle virus
MAIVVKDKVNVNDFINLSNSEKYLPSNSEKYLPSLMTPVKSVRISKVDKVLARENETLSEVDLLKGVKLIEGGYICLAGLVVTGEWNLPDNCTGGVSVCLVDKRMERASEATLGSYYTGAAKKRFQFKVTPNYSVTTDDAKKNIWQVLVNIKGVRMSAGFCPLSLEFVSVCIVFKNNIKLGLREKITRVTDAGPMELTEEVVDEFIENVPMAARLARFRTKSSKTGPKKFVRNSRDSKVRSNNLNRGVRPKFEEEGIVSDKLINDESESIDADSDSYL

SEQ ID NO: 57 - protein, 268 aa, Tomato mottle mosaic virus
MALTVSGKVRISEFIDLSKSERLLPSMFTHVKSVSVSKVDKVMVNEEDSLSEVNLLKGVKLIDGGYVCLAGLVVSGEWNLPDNCRGGVSICLVDKRMQRADEATLGSYYTGAAKKRFQFKIVPNYAITTKDAERNIWQVLVNIRNVKMAGGFCPLSLEFVSVCIVYKNNIKLGLREKITRVDDAGPIELTEEVVDEFMESVPMSVRLAKFRTKSSKRGPKHNSNNTNERKGRSNFRKKQDQESYGVSDSLDNLIEDDTETSVAGSDSY

SEQ ID NO: 58 - protein, 303 aa, Odontoglossum ringspot virus
MGRLRFVVLLSIFPIKTFSEPCYTMALVLRDSIKISEFINLSAFEKLLPSALTAVKSVRIPKVDKIISYENDTLSDIDLLKGVKLVENGYVCLAGLVVTGEWNLPDNCKGGVSICLVDKRMKRANEATLGSYHTSACKKRFTFKIIPNYSVTTADALKGIWQVMTNIRGVEMEKGFCPLSLEFVSICVVYLNNIKLGLREKILNVTEGGPTELTEAVVDRFVEKVPMAARLKSFRSVNKKKPSNSSKFVNGKSRLNSRNKLNYENGDSDVGTSVVDDIVVGNGVSDIRIDDDCESFDAQSESY

SEQ ID NO: 59 - protein, 274 aa, Obuda pepper virus
MSKAIVKIDEFIKLSKSEEVLPSAFTRMKSVRVSTVDKIMAKENDNISEVDLLKGVKLVKNGYVCLVGLVVSGEWNLPDNCRGGVSICLIDKRMQRHNEATLGSYTTKASKKNFSFKLIPNYSITSQDAERRPWEVMVNIRGVAMSEGWCPLSLEFVSVCIVHKNNVRKGLREKVTAVSEDDAIELTEEVVDEFIEAVPMARRLQNLRKPKYNKEKENKNLNNKNSIGVSKPVGLERNKVRSVVRKGVRSDSSLGVTDMSQDGSSSEISSDSFI

SEQ ID NO: 60 - protein, 267 aa, Rehmannia mosaic virus
MALVVKGKVNIGEFIDLTKTEKLLPSMFTPVKSVMCSKVDKVMVHENESLSEVNLLKGVKLIENGYVCLAGLVVTGEWNLPDNCRGGVSVCLVDKRMERADEATLASYYTAAAKKRFQFKVVPNYAITTHDAMKNVWQVLVNIRNVKMSAGFCPLSLEFVSVCIVYRNNIKLGLREKITTVKDGGPMELTEEVVDEFMEDVPMSVRLAKFRSRTGKKNNVKKVKFEGVDRSVPKMNKGKSRNNGGVFERNIFIDNDSETNVAEPDSF

SEQ ID NO: 61 - protein, 271 aa, Brugmansia mild mottle virus
MTLSIRDSFKIDEFINLSKVEKAVPALFSRVKTVRVSTVDKIMATKNDSLSDVDLLKGVKLVNNGYVCLVGLVVSGEWNLPDNCKGGVSVCLVDKRMKRANEATLGSYHSRACKKNFSFKLIPNYSITTADAEKQPWQVLVNIRGVQMEQGYCPLSLEFVSVCIVHKNNVRKGLRERITNVAEGGSLELTEEVVESFVNDVPMAVRLNHLRNGNKKEGFSKGKYVNNNAKERSVNKFVKKSVNGKGGLKVKEISTSVEDYNSSEVSSDSFI

SEQ ID NO: 62 - protein, 266 aa, Yellow tailflower mild mottle virus
MAIALRDTVKINEFINLSKTEEILPAMFTRMKSVRISTVDKVVAKENDSVSEVDLLKGVKLVKNGYVNLVGLVVSGEWNLPDNCRGGVSVCLVDRRMTRHSEATLGSYTAPACKKNFSFKLIPNYSVTTADAERRPWEVMVNIKGVAMAEGWCPLTLEFVCVCIVHKTNVRTGLREKVTSVSEGSPIELTEDVVDEFFESVPMARRLQNLRNRRGNINRNKSQVYKKKNKNNIGDALKERIDEVKDVENKRYDNDDYSIEESSDSY

SEQ ID NO: 63 - protein, 256 aa, Tropical soda apple mosaic virus
MALVVKDDVKISEFINLSTSEKFLPAAMTSVKSVRVSKIDKVIATENDSLSDVDLLKGVKLIEEGYVCLAGLVVSGEWNLPDNCRGGVSVCLVDKRMLRHDEATLGSYKTGAAKKRFAFKLIPNYSVTTADAKRNIWQVLVNIKGVAMEKGFCPLSLEFVSVCIVHKTNIKLGLREKITNVSDGGPVELTEEVVDEFVESVPMAERLRKFRGRSNKKSNKFVEKNNNKRGDKGGKLLKKIDNETETESSDAESSSY

SEQ ID NO: 64 - protein, 264 aa, Cucumber green mottle mosaic virus
MSLSKVSVENSLKPEKFVKISWVDKLLPNYFSILKYLSITDFSVVKAQSYESLVPVKLLRGVDLTKHLYVTLLGVVVSGVWNVPESCRGGATVALVDTRMHSVAEGTICKFSAPATVREFSVRFIPNYPVVAADALRDPWSLFVRLSNVGIKDGFHPLTLEVACLVATTNSIIKKGLRASVVESVVSSDQSIVLDSLSEKVEPFFDKVPISAAVMARDPSYRSRSQSVGGRGKRHSKPPNRRLDSASEESSSVSFEDGLQSDHT

SEQ ID NO: 65 - protein, 258 aa, Cucumber fruit mottle mosaic virus
MSISKVGVRNALKPEEFVKITWVDKLLPDAFTILKYLSITDYSVVQSKDYEHLIPVDLLRGVDFSKSKYVTLVGVVISGVWTIPENCAGGATVALVDTRMSLVSEGTICKFSVSAASRDFTVKLIPNYYVTAADASSKPWSLFVRISGVRIKDGFSPLTLEIASLVATTNSILKKGLRVSVIESVVGSDASVSLDTLSEKVQPFFDSVPITASVVSRDRSYVSKGRPPSRSGPVSRKSKSKSEAESFSDSGASEPLSS

SEQ ID NO: 66 - protein, 262 aa, Kyuri green mottle mosaic virus
MSVSSVGVKNALKPQEFVKLSWVDKVLPDMFTVFRYLSVTDYSVIKSRDSECLIPVDLLRGVDLSKSKYVTLVGVVISGVWTIPENCAGGATVALVDTRMSMVDEGTICKFSVAASTRDFMVKLIPNYYVTASDASSKPWSIFVRVSGVRIKEGFSPLTLEIASLVATTNSILKKGLRVSVLESVVGSDASINLDSVSDKVQPFFDSVPITAAVIARDRSYVSKSGPSRAVRPRPQSKSGKKGDANPAESMSDGDAYEPPRL

SEQ ID NO: 67 - protein, 261 aa, Zucchini green mottle mosaic virus
MSVSKLGVKNVLKPQEFVKLNWVDKVLPDMFTVFRYLSVTDYSVIKSRDSECLIPVDLLRGVDLSKSKYVTLVGVVISGVWTIPENCAGGATVALVDTRMSMVDEGTICKFSVAASARDFMVKLIPNYYVTATDASSKPWSIFVRVSGVRIKEGFSPLTLEIASLVATTNSILKKGLRVSVLESVVGSDASVNLESASEKVQPFFDSVPITAAVISRDRSYVSKSGFNRAVRSKPPSKGGKKFGDSAESLSEDSASELPGL

SEQ ID NO: 68 - protein, 262 aa, Cucumber mottle virus
MSISNLSVESQLKPSNFVKLSWVDKLLPDYFSILRFLSVTDHSVIKAREYESFLPVELLRGVDLTKHKYVTLLGVVISGVWTIPEGCSGGATVGLVDTRMERVVEGTVCKFSVPASVREFNVRFIPNYSITAADAARHPWSLFVRLKGVNIKDSFSPLTLEIAALVATTNSIIKKSLKAIVSDVVVGSDAAVAIADRDSQVNSFFDSVPITKSVVNFDKSYKSRVPKKDSSGGSGKVKRSTGTSGPADTEFSDDGLLSNHSD

SEQ ID NO: 69 - protein, 262 aa, unidentified
MSISNLSVESQLKPSNFVKLSWVDRLLPDYFSILRFISVTDHSVVKAREYESFLPVELLRGVDLTKHKYVTLLGVVISGVWTIPEGCSGGATIGLVDTRMERVSEGTVCKFSVPASVREFNVRFIPNYSITASDAARHPWSLFVRLKGVSIKDSFSPLTLEIAALVATTNSIIKKSLKAVVSSVVVGSDAAVAIEDKDSSVNSFFDSVPITKSVINFDKSYKSKVPRKGSSVVSVKGKAGVGTSGPTDTEFSDYGLHSDHTD

SEQ ID NO: 70 - protein, 267 aa, Turnip vein-clearing virus
MSIVSYEPKVSDFLNLSKKEEILPKALTRLKTVSISTKDIISVKESETLCDIDLLINVPLDKYRYVGILGAVFTGEWLVPDFVKGGVTISVIDKRLVNSKECVIGTYRAAAKSKRFQFKLVPNYFVSTVDAKRKPWQVHVRIQDLKIEAGWQPLALEVVSVAMVTNNVVMKGLREKVVAINDPDVEGFEGVVDEFVDSVAAFKAVDNFRKRKKKVEERDVVSKYKYRPEKYAGPDSFNLKEENVLQHYKPESVPVLRSGVGRAHTNA

SEQ ID NO: 71 - protein, 267 aa, Ribgrass mosaic virus
MSMVSYEPKVNDFLFLTNKEKILPKALTRLKTVSISTKDIISVKESETLCDIDLLIDVPLDKYRYVGILGAVFTGEWLVPDFVKGGVTISVIDKRLVNSKECVIGTYRAAAKSKRFQFKLVPNYFVSTADAKRKPWQVHVRIQDVKIEAGWQPLALEVVSVAMVANNVVMKGLREKIIAISDPDVEGFEGVVDDFVDSVEAFRAVDNFRKKKRKIGEKEAVSRNKYRPEKHAGPNSLYIKEENVLQHHELESVPVLRSGVGRTHTNA

SEQ ID NO: 72 - protein, 267 aa, Wasabi mottle virus
MSTVSYKPKVSDFLSLSRTEEILPKALTRLKTVSVSTKDVISVKESESLCDIDLLVNVPLDKFRYVGILGVVFTGEWLIPDFVKGGVTVSVIDKRLENSKECIIGTYRAAAKDRRFQFKLVPNYFVSVTDAKRKPWQVHVRIQNLKIEAGWQPLALEVVSVAMVTNNVVVKGLRERVIAVDDPNVEGFEGVVDEFIDSVAAFKAVDNFRKKKRKIGGRDVISKYKYRPEKYAGPDSLLNKEENVIQHHELESVPVFCSGMGRAHSDA

SEQ ID NO: 73 - protein, 265 aa, Youcai mosaic virus
MSYEPKVSDFLALTKKEEILPKALTRLKTVSISTKDVISVKESESLCDIDLLVNVPLDKYRYVGVLGVVFTGEWLVPDFVKGGVTVSVIDKRLENSKECIIGTYRAAAKDRRFQFKLVPNYFVSVADAKRKPWQVHVRIQNLKIEAGWQPLALEVVSVAMVTNNVVVKGLREKVIAVNDPNVEGFEGVVDDFVDSVAAFKAIDSFRKKKKRIGGRDVNSNKYRYRPERYAGPDSLQYKEENGLQHHELESVPVFRSDVGRAHSDA

SEQ ID NO: 74 - protein, 288 aa, Streptocarpus flower break virus
MAIVLSKPKVSEFLNLTKAEEILPKFLTRLKTVAISTRDVVSVKGTTDLVDIDLLRDVPVNNWRYVGIVGIVASGEWLLPDNVSGGVAISFVDKRLVDSREAILGTYRAAAVEKRFQFKLIPNYFVSQEDALRRPWQVQVSLKGLKFEEGFSPLTLEFVSVVVCANSVVTKGLRERLNNVGDPNVEVSEVVVDEFVDSISASQSLSRARNKYVRGNGKVGNNSGGFSKYNRHQPERFAGKAMYNSKNVVRGGTSEPTAILHKRMGGSNSIDESLFSVAESDLSDSGCA

SEQ ID NO: 75 - protein, 334 aa, Rattail cactus necrosis-associated virus
MSSLCVSDPAVLLSPELHLKVPQLKSLVQFWKKPFKTCSISMSDVIKVASSNPLSIAVDFSSAMPSGPRNFKYVYILAVVLTGRWHLSESCPGGATFVLYDKRLCGRAEGIYGSFFSKVSASKFQVRFSVGHSMTVNDLLRNPLHLCFSLESVPCQEGYEPLSVEVSSLQLFTDCILEESLSAKLVKYPALCTDNMSVISNVDDVIFKFNSVLNVDNVPNSVKNVVKCNKVFKGRRSRGKWVGSQNEVVVKDGTNVTPHRLIAKDALHQRTTERLRLPDQVMGRPPASDTVSERYADSGFPSTAVSHTTSERTVDDGGLRSDQIGPFPYRYVPY

SEQ ID NO: 76 - DNA, 4759 bp, Arabidopsis thaliana
  source 1..4759: mol_type = genomic DNA
ttcattcatcatcttcctcctctctctcttctctgtatcacccaactaaatcctcacgggattagatccaaagtctcaaactttgatccaaaaacacaaactttgttcaaaagacataaactttgagccaaagtcacaagctttcttggtgaacgatggattacaatccaaatcttcctcctttaggaggaggtggtgttagtatgagaagaagcataagtcgaagtgtaagcagagcaagtaggaacattgaagatatcttctcatctggttcaagaagaacacaatcagtcaacgacgatgaagaagctcttaaatgggctgccattgagaagctaccaacttacagtcgtctccgaaccactctcatgaacgctgtagtcgaagacgatgtttacggtaaccagctcatgagcaaggaggttgatgtaaccaagcttgatggtgaagatcgtcagaagtttattgacatggttttcaaagtagctgagcaagataatgaaaggatcttgactaagctaagaaacaggatcgatagagttggtatcaaacttccaactgttgaagtcaggtacgagcatttgacgattaaagctgattgttacactggtaatagatctcttcctacacttttgaatgttgtgaggaacatgggagagtctgctttaggtatgattggtattcaatttgctaagaaagctcagcttacgattcttaaagatatctctggggttattaaacctggaaggatgacacttttgttgggtcctccttcttctggtaagaccactcttttgttggctttagctgggaaacttgataaatctctacaagtcagtggtgatattacttacaatggttaccaactcgatgagtttgttccgagaaagacctctgcttacattagtcagaacgatcttcatgttggtatcatgactgttaaggagactcttgacttctctgctaggtgtcaaggtgttggtactcgttatgatctgttgaatgagcttgcgaggagagaaaaggacgctggtatattcccggaagccgatgttgatctcttcatgaaagcttctgctgctcaaggtgttaagaacagtctcgtcactgattatactctcaaaattttggggcttgacatttgcaaagacacaatagttggagatgacatgatgagaggtatatctggaggtcagaagaaacgtgtcacaactggtgagatgattgttggacctactaagacactcttcatggacgaaatatccactggtcttgacagttccactactttccaaatcgtcaagtgtctgcaacaaatcgttcacctcaatgaagccacggtgctcatgtctctcctccagcctgctcctgagacttttgatttattcgatgatatcatcttggtgtcggaaggtcagatcgtgtaccaaggaccgagagacaacattcttgagttctttgagagctttgggttcaagtgtcctgagagaaaaggaacagctgatttcctgcaagaggttacttccaagaaagatcaagaacagtactgggtgaacccgaacagaccttatcactacattccggtttcagagtttgccagtagatacaagagtttccatgttgggacgaagatgtctaacgaacttgcagtaccgttcgataagtctcgcggccacaaagcagctcttgtgttcgataagtactctgtctcaaagagggagcttctcaagagctgttgggacaaagagtggctgcttatgcagcgaaacgcgttcttctatgttttcaagactgtccagatcgtcatcattgctgcaatcacgtctacactcttcctgagaaccgaaatgaacacaagaaacgagggtgatgctaatctctacataggagcattgctatttggaatgatcatcaacatgtttaatgggtttgcggagatggctatgatggtttcaagactccctgtgttctacaaacagagggatctcttgttttatccatcctggaccttctcacttcccactttcttgcttgggattccaagctcaatattagaatcgacggcttggatggtggtgacttattactccattggttttgcacctgacgccagccgcttcttcaagcagtttcttctggtgtttctgattcaacaaatggctgcatccctctttaggttgattgcttctgtgtgcagaaccatgatgattgctaatactggtggtgctctcactctacttcttgtgttcttgctcggaggcttccttcttccgaaaggcaagattcctgactggtggggttgggcttactgggtatctcctctcacctatgctttcaacggtctagtagtcaatgaaatgtttgctcccagatggatgaacaaaatggcttcttctaacagcacaataaagcttggaactatggtgcttaatacttgggatgtctaccatcaaaagaactggtactggatttcagttggagccttgctttgtttcacagccctcttcaacattctattcaccttggcacttacctatctcaaccctcttgggaagaaggcaggtttacttccagaagaagaaaatgaagacgctgatcaggggaaagatccaatgcgtagatctttgtctactgcagatgggaacagaagaggagaggtcgcaatggggagaatgagtagggactctgcggctgaagcatcaggtggtgcaggcaataagaaaggaatggttcttcctttcactcctttagctatgtcctttgacgacgtcaaatactttgttgacatgcctggggaaatgagagaccaaggagttacagaaacaagactccaactgcttaaaggtgtgactggtgcatttaggccaggagttttgactgcgcttatgggagtgagtggtgccggtaagactacgcttatggacgttttggccggaaggaaaacaggtggatacattgaaggagatgtgagaatatcaggattcccaaaggttcaagaaacatttgctagaatctcaggatattgtgagcagaccgatattcactccccgcaagtaacagtcagagaatctctgattttctctgctttccttcgtcttcctaaagaagtcggcaaagatgaaaaaatgatgtttgtggatcaagtgatggaattggtagagctggacagtcttagggactccattgttggtttaccgggtgtcacggggctttccacggagcagagaaagagactgacaatcgcggtggagcttgtagccaacccttccatcatctttatggatgagccaacttcagggctagacgctagagcagcggctattgtgatgagggcggtaaggaacacagtggacactggaagaaccgtggtctgcaccattcatcagcctagcattgatatctttgaagcatttgatgaattgatgctgatgaagagaggaggacaagtgatttacgcgggtccattgggtcaaaactctcacaaggtggttgagtactttgaatctttccccggagtgtccaagattccagaaaagtataacccggccacttggatgctcgaagctagctcactcgccgctgagctaaagcttagtgttgactttgctgagttatacaatcaatcagcattgcaccagcgaaacaaagcgttggtaaaagaactaagtgtaccaccagcaggagcatcagatctttactttgctacacaattctcacaaaacacatggggacagttcaaatcatgcttatggaaacaatggtggacgtattggagatctccagactacaatcttgtccgtttcatcttcacattggcaacatctctcttgattggtacagtcttctggcaaatcggaggtaacaggtcgaacgcaggggatctaacaatggtgataggagcattgtatgccgcgattatcttcgtgggaatcaacaactgttcaacagtacaaccgatggttgcagtggaaagaacagtgttctacagagaaagagcagcaggaatgtactcagccatgccatatgccatctctcaagtcacttgtgagcttccctatgtccttattcaaaccgtttactactcactcatcgtctacgccatggttggtttcgaatggaaagccgaaaagttcttctggttcgtcttcgttagctacttctcattcctctactggacttactacggcatgatgactgtttccctcacaccaaaccaacaagtcgcttcgattttcgcctcagcgttttacggtattttcaacctcttctctggtttcttcattccaagacccaaaatcccaaaatggtggatttggtactactggatctgccctgttgcatggaccgtgtatggattgatagtgtcgcagtacggtgatgtggagacacgtatccaagtccttggtggtgctcctgacttaaccgtcaagcaatacattgaggaccattatggtttccaatctgactttatgggaccagtggcggctgtactcatcgctttcaccgtcttcttcgccttcatcttcgccttctgcatcagaactctcaacttccagaccagataaaaccatctctcaaacaacaaagtctctttctttttttgtatcctctgtgttgtttatatgcactataagctttgtatgttctaaatatgtattgtagtgtcataacgaaatttttttgaatatttttatttattgtcttatagatgatgacgaatcggaatcatgtaatataattccacttttttttgtgttta

SEQ ID NO: 77 - DNA, 1642 bp, Arabidopsis thaliana
  source 1..1642: mol_type = genomic DNA
gcttcacgagacaaacgacgaacaacgcaattacgcgttcttatctttctgggtatttcttaattatattactctatataaataaaaatacccagaaacgtaatttcgtcgagttcaaaaattcaattcaaagaataatttctttccataaaaagattgttgtggattaacttctttcttaaaagaatctcatacccgtcgaatcttcttcttcaacctttttctgcgtttttaatattttccctacaaaaagattctcaaaatcgttttacataaacccgatcttgtcaatctccagaaacaaaaaaaaaaaaatggcgatcaagacaaagactagtctaattccaagttgttcatcacctgaggatctaaaacgcgttttgcaaacgctaggttcgagctggggagatgtagttgaagatctggagcgtcttgaggttgttccgttaaaaggagctatgactaacgaggtttatcagattaattggcctactttaaacggtgaagatgttcatcggaaagttcttgttcggatctacggtgacggcgttgaccttttctttaacagaggtgatgaaatcaaaacgtttgagtgtatgtctcatcatggttatggtcctaagcttcttggtcgtttctctgatggtcgtcttgaagaattcatacacgccagaactctttctgcagatgatcttcgtgtagcagaaacatctgatttcatcgctgcgaagctaagagagtttcataagcttgatatgcctggtccaaagaacgttcttctctgggaaagacttaggacttggcttaaggaggctaagaacttggcttcacctatagagatggataagtatcggttggaaggtttggaaaatgaaatcaatttgttggaagagagacttactcgggatgatcaagagattggtttctgtcacaacgatcttcagtatggaaatgtcatgattgatgaagtaaccaatgccattaccatcatagactatgagtattcgagtttcaacccaattgcttatgacattgcaaaccacttttgtgagatggctgctaattaccattcagacactcctcatgttctggactacactctatatccaggagaaggagaaaggagaaggttcattagcacatatcttggctctacagggaatgcaacaagtgataaagaagtagagaggttattgaaagatgcagagagctacactttagcaaaccatatcttctggggactatggggaatcatctcgggacatgtgaacaagattgagttcgattacatggaatatgcaaggcagagatttgaacagtactggcttagaaagcctttgcttcttgaaggatgaagcagattcgcattgaaaagccgatatacaactaaaagtttctgcaattaggtcaaaagaaaaaaagaaaatttagtagactatatgttgctattgttactctcatcagtttgtgtgtttcttcccttctatatagaggtttgttaactctcaaaacagttaaattgagtaaaacttgttctaaacaaagtattatatgataatagaagaagcaccagtggtctagtggcatgatagtaccctgccacggtacagacccgggttcaattcccggctggtgcaattta

SEQ ID NO: 78 - DNA, 1043 bp, Arabidopsis thaliana
  source 1..1043: mol_type = genomic DNA
agtttcaaattagtaaacgataaagtagatgataattaaattcatgtcatagccatgaacgaatgttatgttaaaaaaatttcatgtaagtaaattctttggagttcgattcttcttttgtccttacacaatcaaagatttttctttcaactttttttacttaacagcattaactctttctcagatcttcaattgttttcctaaacgaaattatcattaaattgtttaaaaaatacacatttaatataacatatatcataacaagatatattatatttatgaaaaagagatgtagtactacagcatatggtggcaaacaaacccactaaattcagtaaaatggaacccaccaaatttatctataaataagtccccaaacctctcccccaaaaatgcaacaacactcatctttcccaatataagtttttaccaaacaacaacttttgttttgcctttcctcaaaacataattttgtcttattttctaaaccggtaaaagatgtcgctagctatcgcagaagtttacacggtgaggaagtttcacagagagagtatgaagaaaccggccaaacagacggttaccggcgagggagatgaaaagattggcggaggaagtttcaaggaggcgccggtgaagtcaggtgggtgtagaagattcggacggtggttttttgggaagccgggaatgaagaaaagctctgctaaagtttcggatcccatggcgattgagtgatgaagaagaaattaaaacttttctcttctttgccttttttttttttctttctttattttgttttattttcattggtctttttttaatggctttttctagtgtcttctctttttctttattgggtgattttataaatagtcggtaaacattgtacaatatgaactacaaaaatatgagaaaatctatatatgtatgtagaatggatgtattccctaaataccacagctagtttgataagttttatgccaaaccaactaaacttgtatgccacgatatttcgtatttcagaaaatcgaaaattgttatttttt

SEQ ID NO: 79 - DNA, 1428 bp, Arabidopsis thaliana
  source 1..1428: mol_type = genomic DNA
acaaaaaccatttgaattttctttcttcttcaaaagttcgaaacttttttttttccggcaatggagggactagttccggtacagagacttccaattaaagtggcttcaccttctctgtatcggtgtaacaattctgtctcaatcagacgttcaatttcaggttttgccatggacaggaagataaactttagggctccgtcgcaattctcgatccgagctcaacagtcggatttgaaggaaagcttagctgtgtcttcttcatcagtagaggataaaggaaatgttcttagaatcaaggaatgggaagtagagatgtatcaggaggaattagctattagtcaaggtattaggataaggagaaaaccaccaagtaaggctcctttgggatactctggaccatttgagttgagattgcataacaatgatgctgattctcctcgtaatatcttggaggagatcacatggtacaaagacgtagaagtttcccggatgaaggagctaaatccgcttgacgtgctgaagaaagctgtagaggatgctcctcctactagggattttgttggggctcttaggatggctcataaaagaactggcttccctggcttgatagctgaggttaagaaggcttctccaagtagaggaatcttaaaagagaattttgacccggtcgagattgctcaagcttatgaaaaaggcggagcagcatgcctcagcgttttgacagaccagaagtatttccagggaggctttgaaaacttggaagcaataaggagcgctggtgtgaagtgtccactattatgcaaagagtttgttgtagatccatggcagatctactatgctcggactaaaggcgcagatgcagtactgcttattgctgctgtattggctgacctagaaataaccttcttgcttaagatttgcaagaagcttagcttggctgcccttgttgaggtacatgatgagagagagatgggtcgtgtacttggaatagaaggaatcgagcttgttggcatcaataaccgaagtcttgaaacatttgaagtggacatcagtaatacaaagaagcttcttgaaggagagcatggtagacaaatccgtgagagagacatgattgtggttggcgaatctggtctgtttacaccagatgacattgcctatgtacaagcagccggagtcaaagcagttttggttggagaatccattgtgaagcagaacgaccctgagaaaggaatagctggactttttggcaggaacatttctcatacttagagaccatatcataatacatctccaaatacgtttcctagtacatttgttttgtatcttgctctgtgagtattgaggaaagactagaaaggtttgttggttctgatgtttaagacattttcaaaaaaccatcgaataaactgaatcgaaatcgatttacag

SEQ ID NO: 80 - DNA, 1388 bp, Arabidopsis thaliana
  source 1..1388: mol_type = genomic DNA
agataagagcgaaacaaattacaaaattgaattacacaataatgtcctctaagcgacgactaccggtgaaatattttataagaaaacaaaaacaataattaacaaacaaaggcgacacctttagattcgacaagacgaccattttagaaaaagcttctcaaattctctccttatccccaaaaattcaaacttttttctctttggaaaattctgaggcaaaaatgcggcgtaattgctgccatgtttcatttgcttcaaccctcaagatccttaattttgtccaagctttcattggtgtttcgatcattatctactccatatggatgctccatgaatacagccgtcaccttcccgtggacccgcctccgtcagcttcatcaagctccggaaccgagatcgctactagtgtatctgagcccttgaagaatcctattgattttgtggcgagtatcattctcgggtctaatggtggtgatcatgggtttaacctacgctcgttggaccttcctgctccatggttcatctactctttcatggcggttggtatattggtctgcattgttaccttcattggtttcatagcagctgaagcaatcaatggctgttgcttgtgtttttactctattctcaaaactctgctcattctacttgaagctgcacttgttgcatacatcgctattgaccgtcactgggaaaaggatcttccgtatgatccaactggagaacttagtagtcttagggctttcattgaagaaaacatcgatatatgcaaatgggtggggattgctgtggtagcagtccagctactgtcattgctactagccatggttctcagagcgatggtttcaaccccgaaacccgaacttgacgaagaggaagatgatgagaacccaaggagtagaacttgggacccacttcttggtccgcaaggaaaccaagcgcctgctggctcaagcaagattgaaaactggagctcccgaatcagagaaaagtatggtttgaaccagagtccaccggtgaacccgaaaggttgatgaagccaaataatcatgtttctaaaactgcatgtgtccatatggtctctgtgaagctctctttctctatgttttgctctttgcaacttctcgagtgtgcataaacatttactcaaaacagtgctgtattgtgtttacacaaacggcataagcatcttcgtttgtgtgtttgcttgtacaaacaatcctgtgaacagtttgaagttagcatttccactataacgtttcgattcaatttataatgaagaaaacaaaactaaaaattgaattggacatcataaacagattaatgtaaaatgtatatgtaggttaaactctttcttagattatatcatctatatatgtttcattatt

SEQ ID NO: 81 - DNA, 1145 bp, Arabidopsis thaliana
  source 1..1145: mol_type = genomic DNA
gactccattattatccctctctctacaaaaaaaacagtagagagagatatagagagcatcaatggcgtcgtcgtcaagactttgcgattcgtgcaaatcgacggcagcaactctattctgccgcgcagacgccgcgtttctctgcggcgactgcgacggtaagatccacacagctaacaaactcgcatcacgtcacgaacgagtttggctatgtgaagtatgcgaacaagcaccagcacacgtcacgtgcaaagctgacgccgctgcgttatgcgtcacgtgcgaccgtgatatccactcagctaatccactctctcgccgccacgagcgcgtaccaatcactcctttctacgacgctgtaggtccagcaaaatccgcttcctcctccgtcaatttcgtagatgaagatggcggtgacgtcactgcttcgtggcttttagctaaagaaggaatcgaaatcactaatttgttctccgatcttgattatccgaagattgaggtaacgtcggaggagaatagctccggtaacgacggagttgttcctgtgcagaataagttgtttcttaacgaagattacttcaatttcgatctctctgcttccaaaatttctcaacaaggattcaatttcatcaaccaaactgtttcgacgagaacgatagatgtaccgttggtgcctgaaagtggaggagtgacggcggagatgacgaacacggagacgccagctgtgcagttatcaccggcggagagggaagcaagggttttgaggtatagagagaagaggaagaatcggaaatttgagaagacgattaggtatgcgtcgcgtaaagcttacgctgagatgaggccgagaatcaaaggacgttttgctaagagaacagattcgagagagaatgatggtggagacgtcggagtttatggcggattcggtgttgttccgagtttctgatattttccggtgaaagaaacatggtagtagtatatcggttaatagcagattaaggataattaaaactaaaatgtttcctgatttaatcaggggctaagttattgttagaagattgttgttttttgaattaattctcacaattgtatcctaaattatatagtttacttaatgttgaactaataaattttgatttacaatc

SEQ ID NO: 82 - DNA, 2268 bp, Arabidopsis thaliana
  source 1..2268: mol_type = genomic DNA
atggcggaatcaagctctcctctccctcctctttgtgaaaggatctcacacaaaagctatttcttaagagctgtggatctcactattctaggtcttctcctttctcttctattgtaccgtatcctacatgtgaaccaaaaggacaccgtttggatcgtggctttcctctgtgaaacttgtttcaccttcgtatggttgcttattaccaacataaaatggagtcctgctgattataaaacatatcctgaaagacttgatgaaagggttcatgaacttccaccggtagatatgttcgtgaccacagctgatccagtaagggagccaccgcttatcgttgtaaacacagtgctttcactgttagctgtgaattatccggcgaacaaactagcttgttatgtgtcggacgatggatgttcacctctcacttacttctctctcaaggaagcttctaagtttgccaagatttgggttcctttctgcaagaaatacaacgttagagttagagctccttttatgtacttcagaaactctccggaagcagcagaaggttctgaattcagtaaagactgggaaatgactaagagggagtacgagaagttaagccagaaagtagaagatgccactggaagttcccactggttggatgcagaagatgactttgaagctttcttaaacacaaaatcaaatgatcattcaactatagttaaggtggtatgggaaaacaagggaggtgtgggagacgaaaaagaggtccctcatgttgtttacatttcaagagagaaaagaccaaatcactttcatcattacaaagctggagccatgaactttctggtaagagtgtcagggttgatgacaaatgcaccatacatgttgaacgtagactgcgacatgtatgtcaatgaagcagatgtggtgcgacaagcaatgtgtatatttctgcaaaaatcaatggattcaaaccattgtgcttttgttcaataccctcaagatttctatgattctaatgtcggtgaactcaccgtcttacaattatacttgggacgaggaattgcgggaatccaaggacctcagtatgcgggttcaggatgcttccatactagaagagttatgtacggtctttctctagacgatttaggagacgatggaagtctttcttcaattgctacaaggaagtatttagctgaggagagtctaacgagagaatttgggaattctaaggagatggtgaaatcggtggtcgatgcgttacaaagaaaaccatttccccaaaaaaaccttaaggactctctagaaacggctcaagaaatgggacattgtcactacgagtaccaaaccagctggggaaaaaacatcggttggttatacgattcaacaacggaagatgtgaacacgagtatcggaattcattcgagagggtggactagctcatatatttttccggatccaccggcgtttcttgggtgtatgccacaaggaggaccggaggtaatggttcagcagcgacgatgggccacgggactgctcgaaatccttttcaacaaacaaagtccgttgatcggaatgttttgtcggaaaataagatttcgacaaagcttggcttatttatacgttttcagttggggtctaagatcaatccctgagctcttttactgtctcctgcctgcttattgcctactccacaactctgctttatttcccaagggagtttacttaggtataatcatcacacttgtggggatacattgtctttacactttatgggaattcatgaaccttggtttttccatacaatcgtggtatgtcactcaatcatttgggaggataaaaacaacttgtagttggttatttagcgtccttgatgtcatactcaagcttcttggaatatcgaaaaccgtcttcatagtcactaaaaagactatgcctgagaccaagtcagggtctggatccaaaaaatctcaacgagaagttgattgtccaaaccaagattccggtaaatttgaatttgatggctcgctttatttcttgccgggcacattcattgtgttagtgaatctagccgctctagccggttgtttggtgggtctacaaagtcgcggaggaggtggttcgggtttggcagaagcctgtggctgtattttggtggttattttgttccttccatttctaaagggtatgtttgagaagggaaaatatggtatcccattttctactctttctaaagctgcctttttagcagcgttatttgttgttttatctgtgggaaactag

SEQ ID NO: 83 - DNA, 1381 bp, Arabidopsis thaliana
  source 1..1381: mol_type = genomic DNA
catatttatactactagtatataagttaagggtttaagcctcttctcttccttctttctcttagccatcacatcgataatggcttctcttctaacaaaacccaaacccgttttcctctgttcaccatcgttatctccaagaactttgaacacagcaacaccgtcattgaatttcaccagaatttcattcacccatcaccaaaagcttgctcctttcaagcctcctagtctcgttgttgcattctctgaaaagggtttgaagagagatgtcaccacagctgctgcagcgacggagggagattacagaaggataatgttatctgatgtgttggtgaagaagaaggaaaaagtagtttggtgggagagagaatggaaagctatggactttggagctgttgctgtcgttttgtctatgcatttgcttagtcttttggctccgtttcaattcaattggagagctgtttcggttgcttttgggctttatatcgttacaggtcttctggggattactctgtctttccataggaatctttctcataaagccttcaagctacctaaatggcttgagtacttgtttgcttattgtggagctcaagctcttcagggaaacccaattgattgggtgagtacacataggtaccatcatcagttttgtgattcagacagagaccctcatagcccacttgatgggttttggttcagtcacatgaattggatgtttgataccaatacaatcacccaaaggtgtggagagcctaataatgttggggacttggagaagcagccattctatcgattccttcgaaccacctacattttgcatccgctggctctagcggttgctttatacgcaatgggtggctttccattcatcgtttggggaatgggtgtaagaatagtatgggtatatcatataacttggctagtgaactcagcttgtcatgtatggggaaaacaagcatggaacacaggcgatttgtctaagaacaactggtgggtagcagctctagcattcggggaaggatggcacaacaatcaccatgcttttgagttctcagctcgacacggcttagaatggtggcaacttgatatgacttggtacgtcgttaagttccttcaagccatcggtttagcaactgatgtcaagctcccatcggaagctcagaaacaaagaatggcattcaccagcgactgatcttaaaaaactacatggttatgcctaaagtcaaaactgtcggttcgattgaagctatgaaggttttaaaaaaggattttgttctgcttttttgtgtttacttaaaggtatatatctgtgcaagagattgtatgtgacaaactgattatgaataatatctataattacattcaatacaaaaggaagc

SEQ ID NO: 84 - DNA, 980 bp, Arabidopsis thaliana
  source 1..980: mol_type = genomic DNA
aaatcactcaccacataaagtaaaagtctcatctcttcataaaatagctttaaaccaatcaagtagagtttcttctcaagtctttttattttatttttatcaatggcttcttcagcagtgtctctccaatccatctctatgacaactctcaacaatctttcatgtaatcaacaatttcatcgaagctctcttcttggttcctctaaatccttccaaaatcttggtatctcatctaacggttcagatttctcctatccatcaagtttcactgccaagaagaacctcactgcttctcgagctctctcccaaaacgggaatatcgaaaaccctagaccaagcaaagttcaagaactgagtgtgtacgaaatcaacgaattagatcgacacagccccaagattcttaaaaacgcattcagcttaatgttcggtctcggagatctcgtaccattcacaaacaaactctacacaggcgatctcaagaaacgcgtgggcatcacggcaggtctctgcgtcgtcatcgaacacgtcccagagaagaaaggtgaaagattcgaagctacttatagcttctacttcggagactatggccacttgtccgttcaaggaccatacttgacttacgaggattcgttcctcgccatcactggtggtgctggaatctttgaaggtgcctacggacaggtcaagcttcaacagcttgtgtatccgacaaaactgttctacactttttaccttaaagggttggctaatgatttgccgttggagctcaccggaacaccggtaccgccgtctaaggacatagagccggcgccggaagctaaggcactggagcctagcggagttataagtaactataccaactaattcatgaaattaaaatgtttctcgtatcgctgtgtaatgatataaagatttgtagttttgtgctcttatctgtaataaaatcattgaggaataatatctcgagtatgttttaagtc

SEQ ID NO: 85 - DNA, 2706 bp, Arabidopsis thaliana
  source 1..2706: mol_type = genomic DNA
ccggttacagctacaccgccgttttctctctccgccgtcttttctcttcttctccgactgaatctgtgaaggtgaatttcggagttgagaaagagagattagcgtgtaatggcgatcgataatggcaagcttcaagaagaagaagcctcatctgttactcgattctataacattattttgggttgggactataaacagcttactaaagagaatgagaggaaaaatagaaaggattctaaagagaaattgaatgttgtaaagaatacttataaagatgttgatgattatttcgagacttttgaaccattgctcttcgaggaagttaaagctcaaattttgcagaataaagatggtgaagaagcatcggtgtgtaaaatgagattggtaatggagtgcaacgagggcgaagggtttcactttctgttagtcacatacgaacatgaggaggatgaatatcttgctcaaaatgatcttttattgctatcaaaagaagaggttaaagggaattcatttccttcatcttatgggtttgctgtagtggaacatcgtcaaaataatcttcttcgtcttcggatgtatttagctgaagacattgtgcagataaccaagaatactaaatcctctagaacaaagtcatttatccaagcgctttcaaatatgcgttctcttattacatcatctgccagccctattgacaaaagggtattcagtttaaagttatgtggtttatcaaccattattcgggaatatatagcactacgatcagttagttcgctccctttcaaggatttaatcttcactgcagcagaaaaatcttgtggttttggagatgaagcatggaaaatatctggacctctgaatgaattctttaacgaaaaccttaacaaatcccaaaaggaggcaattgatgttggtctatcaagaaaatccttcgtcttaatacagggtcctccaggtaccgggaaaactcagacgattcttagcatacttggtgctattatgcatgctactcccgcaagagtccagtctaagggtacagatcatgaagtaaagcgtggtattcagatgactatccaggaaaaatacaatcactggggaagagcctctccttggattttgggtgtcaaccctcgagatgctattatgcctgaagatggtgacgatgggttctttccaacctcaggaaatgaattgaaaccggaggtggttaatgcgagtcggaagtacagattacgtgtacttgtctgtgctccatcaaactctgcacttgatgagattgtgttgcggcttctgagttcgggtcttcgtgacgaaaacgcccagacatatacacccaaaatagtacgaattggtctcaaggctcatcactctgttgcgtcagtatcactggatcaccttgtggcacaaaagcgtggctctgccatcgataagccaaaacaagggactacaggaactgatatagatagtatccgcactgcaattttggaagaggctgcgattgtgttcgctacccttagcttcagtggctctgcacttcttgctaaatctaaccgtggtttcgatgtcgttataatagatgaagctgcgcaagctgttgagccagcaactcttatccctttggccactaggtgcaaacaagtatttctggtaggggatccaaagcaactcccagctactgtaatctcaactgttgctcaggattctgggtacggtacaagcatgttcgagagacttcaaaaggctggctatccagtaaaaatgttgaagacccaataccggatgcatccagagataagaagctttccgtcaaagcaattctatgaaggggcactagaagatggatctgacattgaagctcagactactcgtgactggcataaataccggtgctttggtccattttgcttttttgatatacatgaagggaaagagtctcaacatccaggagcaactggttctcgggtaaatctagacgaggtggaatttgttcttctcatctaccacagacttgtaaccatgtacccggagctgaagtctagttctcagctagctattatatcaccgtataactaccaagtaaaaactttcaaagatcggtttaaggagatgtttggtacagaggcagaaaaagtggttgatatcaacactgttgatgggttccagggaagggagaaggatgttgcaatattttcatgcgtcagagctaacgaaaatggacaaatcggttttctctctaattctcggcggatgaatgtggggattacacgagccaagtcttcagtattggtcgttggttcagctgcaacattgaagagcgatccactttggaaaaaccttatcgaaagtgctgagcaaagaaaccgattattcaaggtttcaaagccattgaacaatttcttcagcgaagagaatctggagacgatgaaactgacagaggacatggagattcctgatgcaccgttgtatgaagacgaatctcttccggtggcaccatatggtggagatgatgactttggagatggtgatgctgatcaagacgatgtagccatggccggagaagactaaactctaaaaaccttttcgttattagttagaactttgatattacaggaagtggttgaacatctaacaatatctacacttattatttgtatggttttattttggtttacatacagtaataagaatgtctttacttgtgctacg

SEQ ID NO: 86 - DNA, 1543 bp, Arabidopsis thaliana
  source 1..1543: mol_type = genomic DNA
ctctttctttgtgggttctagtttgtgtgtatatatactatatgcacatacacataggaagatatgatgggttacgagcagatgaatcagatgacaatgacgacaacagcgatgatgaagaattacaataagaagggactaatcaatactccacagaagaaaatgacgaggagaagtgtgtcggctattgatggtggtgcagctgcgacggctaaagaaggagatcgccgtcagaatatcaagactcttgatcttagcggcatgtccttggcttctctctctgcctcttctatcaacttagcttcaatctccaaactcgatctctccaacaacaatattcagaaaattccggaatctctagtagcgagaatgttaaatttgtgggcattggatttgcaatccaatcagctaaaaactcttccaaactccattggatgtctttccaaacttaagtttcttaatgtctccggaaattatctccaatctctccccaaaactatagaagattgcagatcgctggaagagctgaacgccaacttcaacgagcttacaaggctcccagacgcgatagggtttgagctaacgaatctgacgaagctctccgtcaactcaaacaagcttgttctcttgccaaactccgttagctacttgacgtcgctgcgtgtgctcgacgcgcggctaaaccgccttagttccctccctgaggatcttgagaacctcgtgaaccttcaggtcctcaacgttagccagaacttccagcacttgacgacgttaccttactccgttgggttgttgatatctctcgtggagcttgatgttagttataacggaattacggttttaccagactccctcggctgtcttcgccggattcagaagctatccgtggagggtaatcccctcatttccccaccatttgaagtggtggaacaggggttggaagcattgaagcagtatatgagcgagaagatgaccgagtcttataagaaaactccgaccaagaaaaagtcttggggcattggtaagctcgtaaagtacggcctgagctcttctccggggaggagtaccggccgtgaagacgggaaggaaggcttcatcaatgtatctgattaccgccaaatcgacggaatcgcctcaccgcgacatgtgtccctcttcaacccgcgacgcctcttgtctccactctccgcgtatttctctcctcctaggtattagcttatttaggtgtgttgtctgtctttttttttttcatcttctacatacgattccataccgttttcactgttacatccatgtagtgttaaattgttaatgttcttttacgttgttttctgcatgcttggtgtgaggataaaatttaattaaattgtgtatacgtttttttttccctgtctcatagaatttttctatggcttttctcatttcgttgtattgtagttcaattttgttgaacacatttgtaaactattacatagacacttaatattttactatgtatataatgtaaaatcgcatttttgaaagtactccaccatccttctca

SEQ ID NO: 87 - DNA, 1543 bp, Arabidopsis thaliana; identical to SEQ ID NO: 86
  source 1..1543: mol_type = genomic DNA

SEQ ID NO: 88 - DNA, 3675 bp, Arabidopsis thaliana
  source 1..3675: mol_type = genomic DNA
ctttcactcttcccttctctctccccaaaataaatcagaaacctatcaacattcttcaacagccacaagtaaaatttatagacatttctgtctgaagaagaaaaagattgaatttttttgcttgttgtgggttctttaatggatccaagaacaagacttgactatgctctgtttcagctcacaccaactagaacaagatgtgatcttgtgatattctctggtggtgagaatgagaaacttgcttctgggatttttcaacctttcgttacgcatctcaagagcgttagtgatcagatttctaaaggtggatactccgttactctccgtccttcctccgttggtgttccttggtttactaaagtgacccttcagagatttgtgcgatttgtgactactccggaggttcttgagaggtctgtaacattagagaaggagattgagcagatcgaggattcgattcaagctaatgcagccgccattgccggtgaagctgaaggaaacgagttgggtggtacatggacttctcaaaagtctacggctttatcaaagacgaaaggggaaactgatggagacactgtggaagaaaattcgaaggttggtcttcagcgtgttctggagaaccgtaaagcggctttgtgcaaagagcaagcgatggcttatgctcgagctttggttgttgggtttgaacttgactacatggatgacctcttttcgtttgctgatgctttcggagcttcgcggttaagggaagcgtgtgttaactttgtggacttgtgcaagagaaagaacgaggatagaatgtgggtggaccaaatcactgctatgcaagcatttcctaggcctgaattaacgttcatgggtgactctgggatcgtactcgctggtgaagagaatgatttgttgaatgctacaaacgtaaagcatggaaactctatggatgcctcgagccagggtagctttgagactggccaagaagggagagctcaaatggcaatgccgtggccaaaccagtttcctcagtacatgcagaactttcaaggacatgggtatccgcctccttatatgtttccggggatgcaaggtcaatcaccatatttccatgggaatatgcaatggcctgtaaacatgggagatgtggagtcaaatgagaagtcttccaagaagaaaaagaagaagaagaagaataagaagaagtcgaagcaagatgaatctgccgagccaagcgataattccagtactgagaccgaatcagaagacggaaatgaaggaaagaaacaatccaggaaagtggttatccgcaacataaattatataacttcaaagaggaatggagcgaaggagagtgattcagatgagtctggagaagaagaagggtttgtggatggagattctattaagcagcaagtagaagaagccattggctcagtggagagacgtcataaatcgacttcacaccgtcagaggaaacacaaaagtcacaacggtgatgatgattcaagtaacaaggaaactaaggggaatgataattgggatgccttccagaatcttcttttgaaagacaatgattcagagccagaagaattactacgtatatcatcaactgcgttaaatatggcgtctgaagttgtgagaaagagagaaccgccttctgatgattcattcttggttgcaattggaaatgaggattggggaagagaaaccagcattgagaaattcaatgcaggtgagaatgttcggataataaggaaagggaacaactatgacgaggagatgttgaatccgggtagaagcgatgaatcaagaagctattcgcaggcagagatgtcggttcatgatgggaagctcagaaccagaaatgaggcggaagaagactggttcatacgtaaccaagctggtccagaaacagatccaagtcttgtcaaaacatttgtaggagaccatttccacttaaataagagcagtgagagagatgtcctgaccgatgactctttcatgatccattctcgtgttgagaaccaagtagaagattctcggttaaggacagaaatcatggacttagacgtttacggaaccacccaacaagaaaacagtgccccggagaacactccgcatgaaccagatgacctatacatggttcttggacgggaacaagatgttaaacctacattgttaccatggacccctgaaattgactttgagactaacactttggctcaaagaacaagcagaatcgatttgataactgccacaaaggcctctgcaggtgaacaaaccttagatggtaaagaaaagaagagtcgtggtatctccaaggggaaggatgcaaagtcaagagcatcaagtagacctgacccggcgtcaaaagccaagagacctgcttggggaagtagagctgctgtctccaagtccaaatccgagatggaggaagagagaaagaagagaatggaggaacttttaattcagaggcaaaagagaattgcggagaagagttccggtggtagtgtatcaagttctttagcgtccaagaaaactcctactgtgaccaagtcagtgaagagctcgataaagaatgagaagactcctgaagccgcgcagtcaaaggctaagccagtactgagaagttccaccattgagcgccttgctgttgctcggaccgctccaaaggagccacagcaaaaaccagtaatcaaaagaacatcaaaaccttcaggatacaagacagagaaagctcaggaaaagaaatcgagtaaaataggtcaatcagatgcgaaaagtgtggaactttctcgtgacccgagtctcgaaatcaaggaaacggtggtggaagattcacattcttacttgtcagagaagcaagttgatgcacttcctgctgttgcttctgttgatgatttcaaagacattaaagaattgcatagcttgccatcagaagaaacggccagagtaaagaacagaccgaatgaaatcatagcagagaaagtacaagatcagacgaagatcgatgatcaggaaacagtgaagaatacatctgtttctgaagataagcaaatcaccacgaagcattactcagaggatgttggagaagtccaggcttcacaggaaaaaccggtgtctccaaagaagtcggtgactttttcagagacaaacatggaggagaagtattatttctcaccagcggtctcagagattgacatctcaacgccacctgctactgaagcagatcattcgaggaagaaatggaacagtgaagagacgtctcccaaggcaacggctaaagtcttcaggaagcttcttatgttcggaaggaaaaagtaaaaccgacgttggaattcttcttctccggcatcatcgaacctttgttttgagacgacgtcatgttgagttcagagaacaatatatggggatgtgttggaatcatgaatcgtaggttaaatcctacaagaggaaaagcttcaggagacagagaagatgaagagaagagaagaaaggaagaagaagaagaagtcgtgacaaagaaagtcagctaatagacatatctccgctatttaaagtcgagtctaagcctttatacacttaaaggttgagggttcgaacccttgttatgtctttttgccctaaaagaaaaaaactttctcatgaaattccgtgagatgattcttccattctaagcatttg

SEQ ID NO: 89 - DNA, 3675 bp, Arabidopsis thaliana; identical to SEQ ID NO: 88
  source 1..3675: mol_type = genomic DNA

SEQ ID NO: 90 - DNA, 3727 bp, Arabidopsis thaliana
  source 1..3727: mol_type = genomic DNA
atatccagataattaattctctcataatatcttctccacaatttcaactcttctaaagtctaaaccatgaagttactctcaaagacctttttgatattaactctcaccttcttcttctttggcattgcactagcgaaacagagctttgaaccagagatcgaagctttgaaatccttcaagaatggtatttccaacgaccctttaggagtattatcagattggaccatcatcggttcgttacgacactgtaattggaccggaatcacctgcgatagtaccggacatgtagtctcggtttccttgctggagaagcaacttgaaggtgttctgtctccagccatagcgaatctcacctatctccaggttcttgatctcacttcaaatagttttaccggcaaaataccggctgaaataggaaagttaaccgagcttaaccagcttattctgtacctaaactatttctctggttcgattccttctggaatctgggagcttaagaatattttctatcttgatcttagaaataatttgttgtccggtgatgttcctgaggaaatctgcaaaaccagttctttggtattgattgggtttgattacaacaacttaaccgggaaaataccagaatgcttaggagatttggttcatctccaaatgtttgtagcagctggtaaccatttaactggttcgattccggtatcaattggtactctggctaatttaacggatttagacctgagtggtaaccagttaaccggaaaaataccgagagattttggaaatctcttgaacttacagtctctcgttttaactgaaaacttgttggaaggagatataccagctgagatcggaaactgctcgagcttggtccaacttgagctttacgataaccagttaaccgggaaaataccagctgaattagggaatttggttcagctgcaagcactccggatatacaagaacaaacttacttcttcaattccatcttcattgttccggttaactcagttaacccatttggggttatcagaaaaccatttggttggaccgatatcagaagaaatcggttttcttgagtcacttgaagtcctcacacttcattccaacaacttcacaggagagtttccacagtccatcacaaacttgaggaacttgacagtcctaacggtggggttcaataatatttccggtgagctcccggcggatctagggcttcttacaaaccttcggaacctttcagcgcacgacaatcttcttaccggaccaataccttccagcataagtaactgcaccggtcttaaactcctggacctgtctcacaaccaaatgactggcgagatcccgcggggtttcggaaggatgaatcttacgttcatttctattgggaggaatcatttcaccggtgaaattccagatgatatcttcaactgttcaaacttggaaactcttagtgtggcagataacaacttaacaggaactctcaagccattaattgggaagcttcaaaaactcaggattttgcaagtttcatataactctctcactggaccgattcctcgagaaatcgggaatctgaaagatttgaatatcttgtaccttcactctaatggtttcacagggagaatcccgagagagatgtcgaatctcactctcctccaggggctaaggatgtattcaaatgatcttgaaggtccaattcctgaagaaatgtttgatatgaagctactctcagttcttgatctttccaacaacaaattctcaggtcaaattcctgccttgttctccaagcttgaatcgcttacctacttgagtcttcaaggaaacaaattcaacgggtctatccctgcaagccttaagtcgctttcgcttctcaacacattcgatatctccgacaatcttctcactggaaccatccctggagagctgttagcttctttgaaaaacatgcagctttacctcaacttctcaaacaacttgttgactggaaccatcccaaaggagcttggaaagcttgaaatggttcaagaaatcgacctttcaaacaatctcttttctgggtctattccaagatctttacaggcctgcaaaaatgtgttcacactggatttttcgcagaacaatctctcgggtcatataccagatgaagtcttccaaggcatggatatgatcataagcttgaacctttcaaggaacagtttctctggagaaatccctcagagcttcgggaacatgacgcatttggtctccttggatctctctagtaacaatctcactggtgaaattccagagagtctcgccaatctttcgactctgaaacatctcaaactagcttcaaacaacctcaaaggccatgttcctgaatccggggtgttcaaaaacatcaacgcctctgatctaatgggaaacacagatctctgtggtagcaagaagcctctcaagccatgtacgatcaagcagaagtcgagccacttctcgaagagaaccagagtcatcctgattattcttggatcagccgcggctcttcttcttgtcctgcttcttgttctgattctaacctgttgcaagaaaaaagaaaaaaagattgaaaattcatcagagtcctcattaccggatttggattcagctctgaaactgaagagatttgaaccaaaagagttggagcaagcaacagattcattcaacagtgccaacatcattggctcaagcagcttaagcacagtgtacaaaggtcagctagaagatgggacagtgattgcagtaaaagtattgaatctaaaggaattctctgcagaatcagacaagtggttctacacagaagctaaaacattgagccaactaaaacatcgaaacctggtgaagatcttagggtttgcgtgggaaagcggcaaaacgaaagctttagtgcttccatttatggagaatggaaacttggaggacaccattcacggctctgcagcaccgattgggtcgcttttagaaaaaatcgatctttgtgttcatatcgcaagcggaatcgattatcttcattctggatatggttttcccatcgttcattgtgatctgaagccagctaatatactccttgacagtgaccgcgttgctcacgtaagcgattttggaactgctcggattctaggtttccgcgaagatggaagcaccacagcttcaacatcagccttcgagggtacaattggatacttagctccagagtttgcttatatgaggaaagtgacaacaaaagccgatgtattcagcttcgggatcataatgatggagctgatgacgaaacagagaccaacttcgttgaatgatgaagattcacaagacatgactttgcgccaattggtggagaaatcgattggaaatggaagaaaagggatggttagggttcttgatatggaactcggggactctattgtttctctgaaacaggaagaggctattgaagactttctgaagctttgtttgttctgtacaagctctagacctgaagatcgacctgatatgaacgagattcttacacatctgatgaaacttagaggcaaagcgaattcatttcgagaagatcgtaacgaggatcgagaagtttagcagcaaagcttttttgatgacattttttcgactttgccaaactctgttacgaaggttgaatactttggacgtaaaacgttctgattttgcttttcgttatgtatttctgttttatataaggttgaaatttggttttgat

SEQ ID NO: 91 - DNA, 1177 bp, Arabidopsis thaliana
  source 1..1177: mol_type = genomic DNA
caaaacaaaacgccattttttgtcgattcttcgtcgtcctcctttgaaattcacaccaatttgtctctcttcctagagaaacaaaagattattcgaaactcgggaaagtatcatccggtcaccggaaaattgattatttccgatgccaataggtgaccgtcagaatccgagtgtggagaagaagaagaacctcttcaggctatgtccgttttggcagaggagaagcaccacttcttcatcttcaacacagaatccaaaccaaaactaccgtagccgccatggaaatcggaatacagatatttccgccgtctctaagcctccgttgactatgtcttccgtcgccagatcacttcttccagctcgccgtcgtctccgactagatccttctagttatctgtatttcccttatgaacctggaaaacaagttcgcagcgcaataaagcttaagaacactagcaaatctcatactgcatttaagttccaaacaacggcacctaagagttgttatatgcgtcctcccggaggtgttttggctccaggagagagtgtttttgctactgtgttcaagtttgtggaacatccagagaacaatgaaaagcagccgttgaatcagaagagcaaggttaagtttaagattatgagcctgaaagttaaaccaggagtagagtatgtgcctgagttgtttgatgagcaaaaggatcaagtagcagtggagcaggttcttcgggtcatttttattgatgcggaccgcccaagtgctgcattggagaaactgaaacgtcaattggatgaagctgaagctgcagttgaagcaagaaagaagcctcccccagagacagggcctcgagttgtcggggagggtcttgtcatagacgaatggaaggagagaagagagaagtaccttgctcggcaacaagtcgaatccgtagattctttgtcctaaacgcagagagcaatgtggacttgttctgcagatcatgtacataatttattatccctcgattatgtatttatctctagacgattactttgtggttcttgtatgtctctgtttgttgtgtgattcatgccggttttttctccttcatcaaattttgtttcggtcgtttttagttgatctagaatcgaaccagagtttgttcagtatttagttacaaatgaaaaatcctgttatacc

SEQ ID NO: 92 - DNA, 1115 bp, Arabidopsis thaliana
  source 1..1115: mol_type = genomic DNA
tactcacttttacaactaactcataagtaaaacacagacagtttttagatggctaagatatattccccttcttttcccggtactctctgtctttgcatttttactctcttgacgctaatgttcattcgggtttccgctcgacccgcgacattcgtcgaggatttcaaagccgcctggtcggaatctcacatccgtcaaatggaagacggaaaagctatccagctcgtccttgatcagagcactggatgtggatttgcttccaaaagaaaatatctattcggacgagtgagcatgaagatcaaactcattcccggagactctgccggtacggtcaccgctttctacatgaactccgatacggccacggtgagagacgagctagattttgagttcttgggaaacagaagtggtcaaccttactcagtgcaaacaaacatatttgctcatggcaaaggagatagagaacaaagagttaatctttggttcgacccatctatggattaccacacttacactatcttatggtcacacaaacacattgttttttacgtagacgatgtgccaataagagaatacaaaaacaacgaagccaagaacatagcttacccaacatcacaacctatgggagtatactcaacattatgggaagcagatgactgggcaacacgtggtggattagagaaaattgattggagcaaagctccattttatgcttattacaaagatttcgacatcgaaggttgtcctgttcctggaccaaccttttgtccatcgaaccctcataattggtgggaaggttatgcctatcagtctcttaacgccgttgaagctcgacgttaccggtgggttagagtaaaccatatggtttatgattattgtactgaccggtctaggtttcctgtcccaccacccgagtgtcgtgcttgaaaataattgcatacgtacgttgcaatgatcatgtttcgtcttgtacgagattttatatataaattgtgggaaaatgtggattgtattgtcctcttacgcaattgtgcagacgtacgtgagtgtgtatagatataattgtgatttgtggttatttgaaatttttataaacatagatgaattctgtgaag

SEQ ID NO: 93 - DNA, 1981 bp, Arabidopsis thaliana
  source 1..1981: mol_type = genomic DNA
actggtgtgcgcactaagcaagcatactctattatttgtcgaaatcacaagagccagccagtctctctgagttctatcacaatcttcttcttcagagcttattgagtaatggcggcttcaatgcagttctacggagttaaaacaccagaacttgccttaaactcaaaaaggattgagtttagctcaaaggggctcaacttctcagcactcgtgtcctctgctcgtgtattctctagaaacgtagatcgttcttgtaagaacatcgctctgagagttacttgtgaagcgggaagagtggagctgctagagagaaaagcctcagagactttcaagttaaacaaaactgagaaaaaattgacctgtgtaatgaaattcggtggctcatcagtggcatcagcagaaaggatgatacaagttgccaaactcatactcagcttcccagatgagaagcctgttgttgtgctatcagcaatggcaaagaccaccaataagcttttgatggctggggagaaggctgtttgctgcggtgtcaccaacgtcgacactatcgaagagttgagctatataaaggaactccatataaggactgctcatgagcttggagtggaaacagcagttattgcagaacatctagaaggactggaacagcttcttaaaggcgtcgcaatgatgaaggaattaactttacgctcaagagactacttggtttcatttggagaatgcatgtccactaggctatttgctgcgtacctgaacaaaattgggcacaaagcacgacagtatgatgcatttgagatcgggattatcaccacagatgacttcactaatgctgatattcttgaggcaacatacccggcggtttcgaaaaagttacttggtgactggagcaaggaaaatgcactccccgttgtcacaggcttccttggaaagggatggagatcttgtgctgtaactacgcttggtagaggaggtagcgatttgactgcaacaacgatcgggaaggctttaggtttgcgggagatccaggtttggaaagatgtggatggagttttgacttgtgatcctaacatttactgcggagctcaacctgttccacacttgacatttgatgaggctgctgaacttgcttactttggtgcccaggtgttgcatccactttccatgcgcccagcgcgagaaggtaacattcctgtaagggttaagaactcttacaatcccactgctccaggaactgtcatcaccagatcaagagacatgagcaaggctgtattgaccagcatcgttctgaaacgtaatgtcaccatgttggacatcactagcacccgtatgctcggccaatatggtttccttgccaaggtgttttccacatttgaaaagttgggcatatctgtggatgttgttgcaaccagcgaagttagcatttctttgacattggatccttcaaagttctgtagcagagagttaattcaacacgagcttgatcaggtggtggaggaacttgagaagattgctgttgtaaatctgcttcgacacagatcaattatctctctcatcggaaatgttcagagatcatcattcatattagagaagggcttccgagtacttcgaaccaatgggattaatgtccagatgatctcccaaggtgcatctaaggtaaacatctcactgatagtgaatgatgatgaggcggagcattgtgtgaaggctctccactcggccttctttgagacagacacttgtgaagcagtctcagaatgcccgaccggctacatcgctgcctcttcgtgaaacctctaggtgcaacctgcaaggtctgaaagtactagctagtttgatgttatgattcttgtcagactggtattaggaaacaaagctcccattctccttgtgtaatataatgtaatttgattgggagatgtactggaaaatcaataagttttcctatttgaatatatgattaggactgcctacaacatcagtt

SEQ ID NO: 94 - DNA, 3043 bp, Arabidopsis thaliana
  source 1..3043: mol_type = genomic DNA
atgagatctcttctctttgtactatcactcatttgcttttgctctcaaacagcactttcatggaagaaggaagagtttcgcagctgtgaccaaactccattttgtaaacgcgctcgatctcgtactcccggcgcgtgttctctaattgtcggcgatgtttccatcactgatggagatctcgtagcgaagcttctaccgaaagcgcctaatcaaggcgatggggatcagatcaagccgttgattctttctctctcagtttacaaggatgggatcgtgcggcttaaaatcgatgaggaccattcgttgaacccgccgaagaagaggttccaagttcctgatgtggtagtgtctgagtttgaggagaagaagatctggctgcagaaagtagcgacggagacgatctctggagacactagtccgtcttcagtagtttatgtatccgatggttacgaggcggtggtgcgacacgatccgtttgaggtgtatgtgcgtgagaaatcaggtgatcgccgtcgcgttgtgtcattgaattctcatggattatttgattttgagcagttggggaggaaaactgaaggagataactgggaagagaaatttaggactcatacagattctagaccatctggtcctcaatctattagtttcgatgtttcgttttatgattccagtttcgtttatggaattcctgaacacgccactagcttcgcgttgaagcctaccaagggtcctggagttgaggaatctgaaccctacaggctttttaatctagatgtgtttgaatacgatcatgaatcaccgtttgggctttacgggtcgattccgttcatggtttcgcatgggaagtctggtaaaacttcaggatttttctggttgaatgctgcggaaatgcagattgatgtgttggctaatggttgggatgcagagagtggtatttctttgccttctagtcacagtaggatcgacacattctggatgagcgaggcagggattgtggatacattctttttcgttgggcctgagccaaaggatgttgtaaagcagtatgcaagtgtgacaggtacttcagccatgcctcagttgtttgccactggttatcatcaatgtaggtggaactacaaagatgaggaggatgtggcacaggtggactcgaaattcgatgaacacgatattccttatgatgttctctggcttgacattgagcatacagatgggaagagatactttacatgggatagtgtgttgtttcctcatccagaggagatgcaaaagaaattggctgcaaagggtaggaagatggtgaccattgtggatcctcatatcaagagggatgactcatacttcttacacaaagaggctactcagatgggatactatgttaaggattcatctggaaaagactttgatggttggtgctggcctggttcatcatcttacattgatatgttgagcccagagattagaaaatggtggggtgggaggttctcgtataagaactatgttggttcaactccatcattgtacacctggaatgacatgaatgagccttctgtattcaatggtcccgaggttactatgccaagagatgcattacatgttgggggtgttgaacacagagaagttcataacgcatatggatattacttccacatggcgacttccgatggacttgttatgcgtgaagaaggaaaggataggccttttgtattgtcaagagcaatctttcccggcactcaaagatacggagcaatttggactggagataacacagccgaatgggaacaccttagagtctccattccaatgatattgacacttggtcttactggaattacattctctggagctgatattggtgggttttttggaaatcctgaaccagaacttctagttaggtggtaccaagtgggtgcttactatccatttttcaggggtcatgctcatcacgataccaaaagacgagagccttggttgtttggtgaacggaacacagaactcatgagagatgccatacacactcgttacacactgctcccatacttctacacgttgttcagagaagcaaacgttacgggtgttcctgttgtacgcccattatggatggaattcccgcaagatgaagctacttttagcaacgatgaagccttcatggtcggtagtggtctactggttcaaggagtttacaccaagggaacaacgcaagcttccgtgtatttgcctggcaaagaatcatggtatgacttgagaaacggtaagacttacgttggaggcaagactcacaagatggatgctccagaggagagtattcctgcgtttcaaaaggcaggaaccatcatcccaaggaaggaccggtttaggcgaagttcctctcaaatggacaatgatccttatactttggtggtagctttgaacagttctcaagaagcagaaggtgaactctacatcgatgacggcaaaagctttgaattcagacgaggctcttacatccatcgtcgcttcgtcttctcaaagggtgttcttacatcaacgaacttagctcctccagaagctcgtctctcttcccaatgcttgatcgacagaattatcctcttgggacacagctcaggtccaaaatctgcgttggtggaaccgttgaatcaaaaggcagagattgagatgggacctctgcgaatgggtgggcttgtagcttcctcgggtacaaaggtgttgactatccgcaaaccgggtgttcgagtggaccaagactggaccgtaaagattctgtgattgaacggtttgaaccagtttcactcatggccgttagagtggccgaaatctgcttttccggcgacggaatatcacactttttaatatatgtttggagatttagacttaaatagttgtaagagctaacagtttgaaagtcactttgcattgttgtttatcttcatataaatgagtttagattttgataatttcagaattcgtggaatcataattaacaattttgatagggaaaaataatttgttttttttagtcagagggtcaaataatcttaccttc

SEQ ID NO: 95 - DNA, 787 bp, Arabidopsis thaliana
  source 1..787: mol_type = genomic DNA
attttttctagggtttcctcttccgcattcgtcgtcttcagctcctcctacacagtttcttctctgaatctacttaggaagctaaaatgggtagatgtccgactagaaaagtgaagaagaggagattatctcacaaaacagctcgccgtgacaaattcgaagtcaaaggcgatgacttggtttacacagagttgcgtaaaccggagacggagattaagccgttacagcttgacgaggatttgcctggaatgggtcaattctactgcttacactgcgatcgatacttctccaacgtatcagtgagggatgatcatttcaagactaagaaacacaagaagcgtgtgaatatgatgatgggacaagcgccacactcgcaactcgatgcagatttagccgggggaatggggatgccggacaatggcccaaagctgatgtctaatttggtattcacagagttgcgtaaaccagagacggaggatttacctggaatgggtcaattcaactgcttactctgccatcggaacttctccaatgcatcagtgatggattatcatttcaagactaagaaacacaaaaagcgtgtgaagaagatagagcgaccagcgccacactcgcaactcgatgcagatttagctggtggaatgggaatgccagacaatggtccaaagctgatgtctgcctgagtttttacagttattttccttatttagttaatggaacccgaaattttgttgtaaaactataatctcctaaattaatgatacaggttttttgtctgttgccaagt

SEQ ID NO: 96 - DNA, 1397 bp, Arabidopsis thaliana
  source 1..1397: mol_type = genomic DNA
aaaataatggcttcgcccgggttcgaaccggagaccttcagtgtgttagactgacgtgataaccaactacaccacgaaacctacatgcttctttctaacctcaacaatatatatatacatatagataactgtttaatattgtaacttgtaaccagtgtcggctaatttcgacttttgtagatctttttctgctctttctctctctctctctctctctctctctctctctctctctcttgtattatttctatctcccccgccgtcgaaagagaaacgtcgatcggagaacctttgaaatgtcgactggattagatatgtctctcgacgacatgatcgccaagaaccgtaagtctcgtggtggagccggccccgctcgtggaaccggatccggatccggaccgggtccgactcgccgcaacaaccctaatcggaaatcaacccgatctgctccataccaatcagccaaggcgccggagtccacctggggtcacgacatgttctccgatagatctgaagatcaccgatcgggacgttcctccgccggaatcgaaactggaaccaagctctacatttccaatttggattacggtgtcatgaacgaagacatcaaggaactgtttgctgaagttggagaacttaaacgctacacagttcattttgatagaagtggaagatcaaagggaactgctgaagtagtgtattctcggcgtggcgatgcactcgcagctgtgaagaagtataatgatgttcagctggatggaaaacccatgaagatagagattgtgggcactaatcttcaaactgctgcagccccgtctggtagacctgcgaatggaaactccaatggtgctccatggagcagaggaggacaagggagaggaggtcaacaacgaggtggtggacgaggaggcggtggccgaggtggtggtggtcgtggtaggcgtcctggtaagggccctgcagagaagatttctgcggaagatcttgatgcggatcttgataagtaccattctggagatatggagacaaactaaggaacgtgactgatcttctcaaaccggtaggggttttaggaggaagagaatcgagaaaatgtttgccagaggctttaccacttagcgcctttttggctgtgttgttcatttgtttcattagaatgactttacagaattgagaatatgtgttatttaaagttgttgtctatcttaataccctcaagtgaaaggcagaggaaggaataccaatttcgtttacagatcatatgcaggcaaaagagttttcagaaatcaggtttagttacttgtattgtgtctcttatccaagccatgccttgtggtattatgagcgcagaattttgattgaatattgttcatttgcattaaagtatcaaaccattt

SEQ ID NO: 97 - DNA, 636 bp, Arabidopsis thaliana
  source 1..636: mol_type = genomic DNA
aaaactcctccgtaaaaccctttcatttgcatttgggaatcgattgctcttcttcgtagtcgcctttgaattcgcagagtgagaagcaatgaaggtgagatcatctgtgaagaagatgtgtgagttttgtaaaacagtgaaacgtcgtggacgtgtgtatgttatatgctcttccaatcctaagcacaagcaaagacaagggttcagttcctttgcttatgaaggaattacaccttcccctttgtttgctgagccgattgctagtcaggagttggtgaggctgcctggtcagggggtatcagccggactggcatcacttttacacaaaaggcctatgccaacagcgtatttcggatggaggtctggtcttgcatccattctcttcaaacaaggaaattaggatgtcagcatttccctttttattcttcagatttgtaatcgcagttttcttccaattcctatgaaacattattgtatatctctccacttttactttggtcagtcgtatgctccttcgagacctgtttgattgtgcctcgcatgacctgaacaaagagatatattatgacactcgagtatttgtttttacattttccactggagcatatgttagggatcaatatgtttttcttttag

SEQ ID NO: 98 - DNA, 666 bp, Arabidopsis thaliana
  source 1..666: mol_type = genomic DNA
tgctcttcttcgtagtcgcctttgaattcgcagttagagatggatgcttcagattcgttttacttttgcttccatcatcggatcaactaaggattgcagtttttctgagtgagaagcaatgaaggtgagatcatctgtgaagaagatgtgtgagttttgtaaaacagtgaaacgtcgtggacgtgtgtatgttatatgctcttccaatcctaagcacaagcaaagacaagggttcagttcctttgcttatgaaggaattacaccttcccctttgtttgctgagccgattgctagtcaggagttggtgaggctgcctggtcagggggtatcagccggactggcatcacttttacacaaaaggcctatgccaacagcgtatttcggatggaggtctggtcttgcatccattctcttcaaacaaggaaattaggatgtcagcatttccctttttattcttcagatttgtaatcgcagttttcttccaattcctatgaaacattattgtatatctctccacttttactttggtcagtcgtatgctccttcgagacctgtttgattgtgcctcgcatgacctgaacaaagagatatattatgacactcgagtatttgtttttacattttccactggagcatatgttagggatcaatatgtttttcttttag

SEQ ID NO: 99 - DNA, 1991 bp, Arabidopsis thaliana
  source 1..1991: mol_type = genomic DNA
attccttgcttcatttttcgtcaccctagccgctttactctcttgcgatatctctgaggtaattctggagcagcataaacaatcaattgattcattcttcttgataccaagttgtggaaactctaggattgtttgctgtatatctccagaattgctgttttgattgaatttaggtcgcttagctcagttgatagagcaccacattttttgtggtagaaatcgatttgtttgacagtctctaaccatgggtaaagagaagtttcacatcaacattgtggtcattggccacgtcgattctggaaagtcgaccaccactggacacttgatctacaagttgggtggtattgacaagcgtgtcattgagaggttcgagaaggaggctgctgagatgaacaagaggtccttcaagtacgcatgggttttggacaaacttaaggctgagcgtgagcgtggtatcaccattgacattgctctctggaagttcgagaccaccaagtactactgcactgtcattgatgctcctggccatcgtgatttcatcaagaacatgatcactggtacctcccaggctgattgtgctgtccttatcattgactccaccactggtggttttgaggctggtatctccaaggatggtcagacccgtgagcacgctctacttgctttcacccttggtgtcaagcagatgatctgctgttgtaacaagatggatgccactacccccaagtactccaaggccaggtacgatgaaatcatcaaggaggtgtcttcctacttgaagaaggttggttacaaccccgacaaaatcccatttgtgcccatctctggatttgagggtgacaacatgattgagaggtccaccaaccttgactggtacaagggaccaactctccttgaggctcttgaccagatcaacgagcccaagaggccgtcagacaagccccttcgtctcccacttcaggatgtctacaagattggtggtattggaacggtgccagtgggacgtgttgagactggtatgatcaagcctggtatggttgtgacctttgctcccacaggattgaccactgaggtcaagtctgttgagatgcaccacgagtctcttcttgaggcacttccaggtgacaacgttgggttcaatgttaagaatgttgctgtcaaggatcttaagagagggtacgtcgcatccaactccaaggatgaccctgccaagggtgctgctaacttcacctcccaggtcatcatcatgaaccaccctggtcagattggtaacggttacgccccagtcctggattgccacacctctcacattgcagtcaagttctctgagatcttgaccaagattgacaggcgttctggtaaggagattgagaaggagcctaaattcttgaagaatggtgatgctggtatggtgaagatgactccaaccaagcccatggttgtggagaccttctctgagtacccaccacttggacgtttcgctgtgagggacatgaggcagactgttgcagtcggtgttatcaagagtgttgacaagaaggacccaactggagccaaggttaccaaggctgcagtcaagaagggtgccaagtgaactctgaacatcaaaactctttccgctgatgaaatgaaggactattttagtttctttactttagtagtttggtatttggttggttgtttgtgttaccgcttcgtttattctccgtcggagctcaattctcggaattgggttcttgatcggaggtggcggaggtacttggcactcgagcttcctgtttatttcttttgttttgtgttatgattttgaacctttttggatattcggttatatgatatttgtgtcattcctgcggatattatcttatcttatcaacttaagtctgtttttcttctctaaaattcaacgatcagcctctgaagtttcttacatggtaaaattgtaatctagaactttaaacaacattggagaaacaagtctatatcagttt

SEQ ID NO: 100 - DNA, 1408 bp, Arabidopsis thaliana
  source 1..1408: mol_type = genomic DNA
tcatgatccttaatcttagctcctagggtttctgtgaattagtctaattttacaattttatgcctttgaggatatatcttaatgtgaaagttttaaacttgtaactcaaaaaccatttgttagttagtaatcatcatcattctgaattgagctttgtttgaatttgagtagggcaacgaaagattcaagttagttgcggtggtaagagtgaggtgttgaagagtgatacaatggaacctcatgaagcagaaacgtttgtgaacaagagaaccctttatgctcccattgagccatatagcagtggaaatttaaaggtttcagatgttcacactctctactgggagcaatcaggcaaacccgatggacacccggttgtttttcttcacggcgggccgggaggagggacggctcctagtaataggagattcttcgatccggagttttatcggattgttctgtttgatcagagaggtgcggggaagagtacaccgcatgcttgtttggaggaaaacaccacatgggaccttgtgaatgatattgaaaaactaagagaacatttgaaaatacctgaatggctggtttttggaggatcatggggaagcactctagctcttgcatacagtcagtctcaccctgacaaggttactggtttggtccttagagggatctttttgttgcgtaaaaaggagattgactggttttacgagggcggtgctgctgctatttaccctgatgcttgggaggagttcagagatcttattccagaaaacgagagaggtagtagccttgtggacgcgtatcacaaaagattgaattctgatgatctggaaattcaatacgcagctgcaagagcttggactaaatgggaaatgatgactgcttatcttcgtccaaatcttgaaaacgttcaaaaggcagaggatgataaattttcattggcgtttgcaaggattgaaaatcactactttgttaacaaaggtttcttcccgtcggactcacacttgctagacaatgttgataaaatacgacatatcaagaccaccattgttcagggaaggtatgacgtatgctgtcctatgatgtctgcttgggatctgcacaaagcatggccagaggcagaactcaagattgtttatgatgctgggcactcggcaaatgagccaggaatatcagcggaactcgtggttgccaatgaaaagatgaaagcacttatgggatgaagtatttgatggaatgaaagctgctcattttgttcatttctttgggacctttgttcatattttcaagtttgttgctgcaaagtaaatatcacattcagagttagttgttaacgcgaaaccgaatgttatttccatggacgtttatacccaaatgaaaaagacaatgacataggtgcagtgttttgaaa

SEQ ID NO: 101 - DNA, 1213 bp, Arabidopsis thaliana
  source 1..1213: mol_type = genomic DNA
acagagttcagaatatcgacggcgacaatttctctctccggctaacttttttctagagaaagctatggcggacgaagaagatgagttactggagacagaactaagttacgaccagaaaaaggaaatcgccaagtggtttttcctcaacgctcccgctggagaaatcaattacgtcgctaaagatttaaaggcggttttgagcgatgaggaagtgtacaatgaagcagccatggaagcatttccagtgtacaacaaaactcacatgatttgccttgaaatgcccagtggagctggtgatgtgattgtctcatcttacagtgaaattaatgaaaatgagtaccttgatccaagaactgcccaggttgccatagttgatcatgttaaacagatttgtacaaaggtacggcctgcaaatgatgaagaacttccttctttgtatattgaggagtacagatatgctcttgatgctgaaatccagagatatgttagtgaatcttatccgaaaggtatgtctgcagttaattgtgtgaaagggaaagataatgagggtccagggtccgactttgagcttgttgttataattactgctatgagacttagtccccagaacttctgtaatggaagttggagatctgtatggaacatagatttccaggatgaatcccaggtgcttgacataaaagggaaattgcaggtaggagctcattattttgaagagggaaatgtggaattagatgcaaaaaaagatttccaagattcaacaatatttcagtctgcagatgactgcgcgattgccatagccaatattatcaggcaccatgaaacagagtaccttgcatctctagaggtagcttattcaaaattaccggataacactttcaaggatttgaggaggaaacttccggtgacacgaactctgttcccatggcagaacactttacagttcagcctaacaagagaggtcgagaaagaacttggacttggcaagataagtattatttctgttgtgtcttgtctttcctttggagtaatgtatacaaatcgcattagtaagtatgatagatattgttccgcaagccgcatgaaagaattgaagtttggtcccaaaaagagctccgttgccgggaatcgaacccgggtctcctgggtgaaagccagatatcctaaccgctggacgacaacggatatgttattggaactgttaaagaactaa

SEQ ID NO: 102 - DNA, 2160 bp, Arabidopsis thaliana
  source 1..2160: mol_type = genomic DNA
ctcgtctccttctccacttggatctcaaaagtccgatccaaaaccaaatccgccataactctctctctctctcccacttcccacagagagacacattcatgccagcaatgccaggtctcgtctcagtcaaaactccttccgatacaccgccgctacgtgtagccgtaccagacacgcaacctctctcaaacccgccgcgaactccgatgaagaaaaccccttcctctacaccatctcgatccaaaccatcaccaaatagatccaccggcaaaaaagattccccaaccgtatcctcctccaccgcagccgtaatcgacgtcgacgatccatctctagataatccagatctcggtcctttccttctaaaattagctcgtgacgctattgcttctggtgaaggtcctaacaaagcattagattacgcgatccgagcaactaagtcctttgagagatgttgcgccgccgttgctccgcctattcccggtggtagcgatggtggacctgttcttgatctcgctatgagccttcatgttctcgctgctatttactgtagtctcggccgatttgatgaagctgtaccacctcttgaacgagctattcaagtccctgatccgactcgtggccctgaccactctctcgctgcgttttctggtcatatgcaacttggtgatacgttgtctatgcttggtcagattgatagatctattgcttgttatgaagaaggtcttaagatccagatccagactttgggtgatactgatccacgagttggtgaaacttgcaggtacttagcagaagcatatgttcaagcaatgcagttcaataaagcggaagagttatgcaagaagactctagagattcaccgagcgcatagtgaacctgcttcactggaggaagcagctgataggagattgatggcaattatctgcgaggctaaaggagattatgaaaacgctcttgagcatcttgttcttgctagtatggctatgattgcgagtggacaagaatctgaggttgcatcgattgatgttagtattgggaatatttacatgtcgctgtgccggtttgatgaagctgtgttttcatatcagaaggctcttactgtgtttaaggcttctaaaggagagactcatccgacggttgcgtcagtgtttgttagattggctgagctttaccatagaacagggaaacttcgtgagtctaagtcttactgtgagaatgcgttgaggatatacaataagccggtgcctgggacaactgtggaggagattgctggtggattaactgagatttctgctatttatgagtctgtagatgaacctgaggaagcattgaagctacttcagaagtctatgaaattgcttgaggataagccaggacagcagagcgccattgcagggttagaggcacggatgggagttatgtattacacagtggggaggtacgaggacgcaagaaacgcgtttgagagcgctgtgacaaagctacgggcagcaggtgagaaatctgccttcttcggtgttgtattaaaccagatgggactagcctgcgttcagcttttcaagattgatgaagcgggtgagctgtttgaagaagcaagaggtattcttgaacaagaacgtggaccgtgcgatcaggacactctcggtgtttatagcaatctagctgctacctatgacgctatgggaaggatagaggatgcgattgagatattagagcaggttctgaagctgagagaggaaaagctcgggactgcgaatccggattttgaagacgagaagaaacgtttggccgagcttttgaaggaagctgggcggtcgcggaactacaaagccaagtcgctccagaatctgattgatccaaatgcaagacctccgaagaaagagtcttctgctaagaaatggcccagcctcggtttcaagttctgaggaaaaaattatcatataaaataaatcatccacatatatattcaatattttattttattgttattgttatattttttatctgatctattttctgtatcataatctgaggttgatgaattaatttcatgtatagtgtttttatttgagtttggtgaaatactgccaagatggtgagctgtttgtttgagtttgaaatttctttaattcaatcacttttttcttcttctgataa

SEQ ID NO: 103 - DNA, 2248 bp, Arabidopsis thaliana
  source 1..2248: mol_type = genomic DNA
ctcgtctccttctccacttggatctcaaaagtccgatccaaaaccaaatccgccataactctctctctctctcccacttcccacagagagacacattcatgccagcaatgccaggtctcgtctcagtcaaaactccttccgatacaccgccgctacgtgtagccgtaccagacacgcaacctctctcaaacccgccgcgaactccgatgaagaaaaccccttcctctacaccatctcgatccaaaccatcaccaaatagatccaccggcaaaaaagattccccaaccgtatcctcctccaccgcagccgtaatcgacgtcgacgatccatctctagataatccagatctcggtcctttccttctaaaattagctcgtgacgctattgcttctggtgaaggtcctaacaaagcattagattacgcgatccgagcaactaagtcctttgagagatgttgcgccgccgttgctccgcctattcccggtggtagcgatggtggacctgttcttgatctcgctatgagccttcatgttctcgctgctatttactgtagtctcggccgatttgatgaagctgtaccacctcttgaacgagctattcaagtccctgatccgactcgtggccctgaccactctctcgctgcgttttctggtcatatgcaacttggtgatacgttgtctatgcttggtcagattgatagatctattgcttgttatgaagaaggtcttaagatccagatccagactttgggtgatactgatccacgagttggtgaaacttgcaggtacttagcagaagcatatgttcaagcaatgcagttcaataaagcggaagagttatgcaagaagactctagagattcaccgagcgcatagtgaacctgcttcactggaggaagcagctgataggagattgatggcaattatctgcgaggctaaaggagattatgaaaacgctcttgagcatcttgttcttgctagtatggctatgattgcgagtggacaagaatctgaggttgcatcgattgatgttagtattgggaatatttacatgtcgctgtgccggtttgatgaagctgtgttttcatatcagaaggctcttactgtgtttaaggcttctaaaggagagactcatccgacggttgcgtcagtgtttgttagattggctgagctttaccatagaacagggaaacttcgtgagtctaagtcttactgtgagaatgcgttgaggatatacaataagccggtgcctgggacaactgtggaggagattgctggtggattaactgagatttctgctatttatgagtctgtagatgaacctgaggaagcattgaagctacttcagaagtctatgaaattgcttgaggataagccaggacagcagagcgccattgcagggttagaggcacggatgggagttatgtattacacagtggggaggtacgaggacgcaagaaacgcgtttgagagcgctgtgacaaagctacgggcagcaggtgagaaatctgccttcttcggtgttgtattaaaccagatgggactagcctgcgttcagcttttcaagattgatgaagcgggtgagctgtttgaagaagcaagaggtattcttgaacaagaacgtggaccgtgcgatcaggacactctcggtgtttatagcaatctagctgctacctatgacgctatgggaaggtaaagtcctaaagaaaactatctgactatgtaattagatcagacatccttaatgaaacattaaagtctttcttcgtgatggctatgtaatttgcaggatagaggatgcgattgagatattagagcaggttctgaagctgagagaggaaaagctcgggactgcgaatccggattttgaagacgagaagaaacgtttggccgagcttttgaaggaagctgggcggtcgcggaactacaaagccaagtcgctccagaatctgattgatccaaatgcaagacctccgaagaaagagtcttctgctaagaaatggcccagcctcggtttcaagttctgaggaaaaaattatcatataaaataaatcatccacatatatattcaatattttattttattgttattgttatattttttatctgatctattttctgtatcataatctgaggttgatgaattaatttcatgtatagtgtttttatttgagtttggtgaaatactgccaagatggtgagctgtttgtttgagtttgaaatttctttaattcaatcacttttttcttc

SEQ ID NO: 104 - DNA, 1337 bp, Arabidopsis thaliana
  source 1..1337: mol_type = genomic DNA
ttaaagtaatgacttttttttatatgatatattctcaattttgttactcggaaacaatagaaaggataacgaatcgtttctcttcgatcgaaagaatatatatttggaagttttctctgcttttttgttttcgtttgatagaatgggaacagttctcgattcgcattttctggctctcactgctattgtcactgtgatttaccagttcatattcttcgtaatcacggctcttttcaaatttgatcaagtcactgactttgctggtagcacaaacttcgttatacttgctgtgttaacacttgttctcaaagcctcttggcattttcgacagatagtattgactttgctagttgtggtatggggtcttcgcttggggattttccttctaatgaggatcttgcaatggggggaagatcgtcgctttgatgaacagcgtggaaatatagtgagactaatcattttctggactcttcaggctgtgtgggtttggacggttagcttacctttaacacttgttaatgcaagtgatggtggtggatctcttaaacccgcagatgttatcggttggactatgtgggttttcggtttcttgattgaagctgcagctgatcaacagaagctatcattcaaaaactctcctgaaaacagaggaaaatggtgtgatgttggagtctggaagtattcaagacatccaaactacttcggtgagatgttactgtggtggggaatctttgtggctgcatcgcctgtgcttgaaggtgcagagtatcttgtcatattcggaccactctttctcactttgctacttctattcgtcagcggcataccattactcgaggcatcggctgacaaaaaacatggaaactcaggagcttacagatcctacaagaagacaacaagtcctctgattctgttcccaagaggagtgtatgggaacttaccaggatggttcaagacggtctttctcttcgagtttccattttacagccgaaatctccctcaagagggtagactccaaaacagcaaagagaaagaagtaaaagatgactgatttgtgatactcatatttgagttattgttcttcacaacactctttgataaaatttgtgtaaaaaattgcccgtaagaaactgaatttgtttgaaatattggacagtcttgacagattatctcagttgtatttggttcttttttttatgtgattttgttttttggttaaaaaaagttcccattccaagaatcgaacccgggtctcctgggtgaaagccaaatatcctaaccgctggacgacatcggatttgattatttgattatttaattactttatatgttgattt

SEQ ID NO: 105 - DNA, 1079 bp, Arabidopsis thaliana
  source 1..1079: mol_type = genomic DNA
gaagagtaagagtaaaaaacaaaaccttcgtctctaacaaatgtgtggcagctgattgaaactagtagtggtgaaggagaaggagaatgggagatctctacgctttggacttcgatggagttctctgtgatagttgtggagaaagctctctatctgctgttaaggcagccaaagtgagatggcctgatttgttcgaaggagttgattccgctttagaggaatggatcgtcgatcaaatgcatattgtgagacctgtggttgaaactggctatgaaaatcttctacttgtgcggctgttattggagaccaagataccgtctattcgaaaatcttcagttgcagaggggttgacggttgatgggatactggagagctgggcaaagtttaagcccgtgatcatggaagcttgggatgaagatagagatgctttggtagatttgtttggaaaagttagagatgattggattaacaaggacttgacaacttggattggtgccaatagattctacccaggagtttcagatgcactgaaatttgccagctcaaagatttatatcgttaccacgaaacagggccgctttgcagaagcgttactgcgtgaaatagcaggtgtaatcataccatcagaaaggatttatggtttgggttcagggccaaaggtggaagttctaaagctacttcaagataaaccagaacatcagggcttgacgctgcatttcgtggaagacagactcgcaacgctgaaaaatgtcataaaagagcctgaattagacaaatggagtttatacctaggaacctggggatacaacactgagaaagagagagctgaagcagcaggcattcccaggattcaggttattgagctctccacgtttagcaataagcttaaatgagtgcatatactcattggaaaagaaacaaagctttcctctttattgtattctacggcattcaacggaaactaaaaaccaaacatgtttaggtaagattcagtaaaagagttgaactttcagtactacccattatagaagcttttctgtgacctataattcatccttagtaagatcattcttgttacc

SEQ ID NO: 106 - DNA, 1064 bp, Arabidopsis thaliana
  source 1..1064: mol_type = genomic DNA
gaagagtaagagtaaaaaacaaaaccttcgtctctaacaaatgtgtggcagctgattgaaactagtagtggtgaaggagaaggagaatgggagatctctacgctttggacttcgatggagttctctgtgatagttgtggagaaagctctctatctgctgttaaggcagccaaagtgagatggcctgatttgttcgaaggagttgattccgctttagaggaatggatcgtcgatcaaatgcatattgtgagacctgtggttgaaactggctatgaaaatcttctacttgtgcggctgttattggagaccaagataccgtctattcgaaaatcttcagttgcagaggggttgacggttgatgggatactggagagctgggcaaagtttaagcccgtgatcatggaagcttgggatgaagatagagatgctttggtagatttgtttggaaaagttagagatgattggattaacaaggacttgacaacttggattggtgccaatagattctacccaggagtttcagatgcactgaaatttgccagctcaaagatttatatcgttaccacgaaacagggccgctttgcagaagcgttactgcgtgaaatagcaggtgtaatcataccatcagaaaggatttatggtttgggttcagggccaaaggtggaagttctaaagctacttcaagataaaccagaacatcagggcttgacgctgcaactcgcaacgctgaaaaatgtcataaaagagcctgaattagacaaatggagtttatacctaggaacctggggatacaacactgagaaagagagagctgaagcagcaggcattcccaggattcaggttattgagctctccacgtttagcaataagcttaaatgagtgcatatactcattggaaaagaaacaaagctttcctctttattgtattctacggcattcaacggaaactaaaaaccaaacatgtttaggtaagattcagtaaaagagttgaactttcagtactacccattatagaagcttttctgtgacctataattcatccttagtaagatcattcttgttacc

SEQ ID NO: 107 - DNA, 1133 bp, Arabidopsis thaliana
  source 1..1133: mol_type = genomic DNA
gcagctgattgaaactagtagtggtgaaggagaaggagaatgggagatctctacgctttggacttcgatggagttctctgtgatagttgtggagaaagctctctatctgctgttaaggcagccaaagtgagatggcctgatttgttcgaaggagttgattccgctttagaggaatggatcgtcgatcaaatgcatattgtgagacctgtggttgaaactggctatgaaaatcttctacttgtgcggctgttattggagaccaagataccgtctattcgaaaatcttcagttgcagaggggttgacggttgatgggatactggagagctgggcaaagtttaagcccgtgatcatggaagcttgggatgaagatagagatgctttggtagatttgtttggaaaagttagagatgattggattaacaaggacttgacaacttggattggtgccaatagattctacccaggagtttcagatgcactgaaatttgccagctcaaagatttatatcgttaccacgaaacagggccgctttgcagaagcgttactgcgtgaaatagcaggtgtaatcataccatcagaaaggatttatggtttgggttcagggccaaaggtggaagttctaaagctacttcaagataaaccagaacatcagggcttgacgctgcagtaactcacgttctatatatctatcaataattcttctatctgcatgacttggtaatggtcaccattagtttacaatccctatgcatttttaatttggccagtttcgtggaagacagactcgcaacgctgaaaaatgtcataaaagagcctgaattagacaaatggagtttatacctaggaacctggggatacaacactgagaaagagagagctgaagcagcaggcattcccaggattcaggttattgagctctccacgtttagcaataagcttaaatgagtgcatatactcattggaaaagaaacaaagctttcctctttattgtattctacggcattcaacggaaactaaaaaccaaacatgtttaggtaagattcagtaaaagagttgaactttcagtactacccattatagaagcttttctgtgacctataattcatccttagtaagatcattcttgttacc

SEQ ID NO: 108 - DNA, 700 bp, Arabidopsis thaliana
  source 1..700: mol_type = genomic DNA
acatcttctcttttcttccccagcaaaaaatgagtctgcaaaatagaaaattcaagctgcgattgcgaggaagagaagagacttcagatctagcttgatccggtgataatggcgctcgagtgggtggttttaggttacgcggcggcggctgaagcgattatggtggtgctattgacgatgccaggactcgacggactccgcaagggattagtcgccgtcacgcgtaatctcctcaaaccgtttctctccatagttcctttctgtctcttcctcttaatggacatctactggaaatacgaaactatgccttcgtgcgatggcgattcctgcacaccgtcagagcatcttcgtcaccagaagtccatgatgaaatcccagcgaaacgcgcttctcattgcggctgcacttgtgttctactggatcctttactcagtcaccaatttggttgtcaagatcgagcatcttaaccagaggatcgagaggctcaggaacaaggattgatcgtctcgtctcaggttcaattagtgtaatgccttttttggttatctttcccatttggctaggttttctctttttcaacgtttctgatatgtgtcttttatcttgtggagattgaaggattttatcctacttttctatgtttggattcttatttgtaaccagattgtgattgtttcttgttgaattttgattgactcta

SEQ ID NO: 109 - DNA, 1754 bp, Arabidopsis thaliana
  source 1..1754: mol_type = genomic DNA
tctccacaaacaaacttgtactagaaaaatccctaaatctcaacaaaaccctaatttcaaggaagacgaagaaagaatgagttacagagtcgctaaagcatcgcagtatcttgcgatcaccggtggtgggatcacagacatcaagcttgcaaagaagtcttgggtgtttccatggcagtcttgcaccgtcttcgacgtttctccggtgaactacacgttcgaggttcaagctatgagttccgagaaacttccctttgttattcctgctgttttcacaatcggtcctcgcgttgatgatcctcacgctctcttgttgtatgccatgcttatgtctcaacacgataagcactcgaatcacgtcaatgagcttgttcagggtgttatcgaaggagagactcgtgttcttgttgcttccatgactatggaagaggtcttcaaaggaacaaaggagtttaagaaggaagtgtttgacaaggttcagctagagctaaaccagtttggtcttgtgatctacaacgccaatgtgaagcagcttgttgatgtgcctggacatgagtacttctcttacttgggccagaagactcagatggaagcagcaaaccaagccaagatcgatgtagcagaggcaaagatgaagggagaggttggtgccaaagaaaggactggactcacaatccagaatgcagccaagattgacgctgagtcaaagatcatctctactcaaaggctaggagaagggacaaaagaggagatcaaggtgaagactgaagtcaaagtgtttcagaatgagaaagaggctcttgttgctaaggctgatgcagcacttgcgattcaaaaggctgctttgtcccaaaactctcgtgtggctgaggttgaagcagccaaggctgttgctttgagggaagctgagcttcagactaaagtagagaagatgaatgcattgactcggacagagaagcttaaagctgagttcctcagtaaagccagtgttgagtatgaaactaaggtgcaagaagcgaactgggagttgtacaataagcaaaagcaagcagaagctgttctttacgagaagcagaagcaagcggaagcgacgaaagctgcagctgatgctgccttctattcaaaacagaaagatgcagagggacttgtcgcaatggccgatgctcaggggacttacctcaagaccctcttaggcgcagttaacaatgattactcagccatgagagacttcttgatgatcaacaatggcatttatcaggatattgccaagaccaatgctgttgcgatcagggacctgcagcctaagatcagcgtgtggaaccatggtggtgctgagcaggggatgaacggtggtggtaaagctacgatgaacgatattgctggactctacaagatgttaccaccggttcttgatacggtttatgagcagacagggatgcagccaccagcttggattggtacattgcgtggtgctgagcccaaacaatcacttcatgctcaacaacacagaggttgagatctcaaatgttgcttctttaattatacttttagctgttggggtttgttttctttttcttatgttatagaacttggaagttagagtttgaagttaaaacaatagtatctgacaaatgcgacttcgactagtgatttcgataaggatgtgtttttcctttttcaaatgtcagatttattattgcgtgttgaagatacctttcttctctcttgatacactaatataaataacatgttta

SEQ ID NO: 110 - DNA, 683 bp, Arabidopsis thaliana
  source 1..683: mol_type = genomic DNA
cacagaaccctccctctctagctctaaaaacatcccacaaactatctttcaacaacacaagacatatcacgaaacaaatcaaagcaaagatcatgaacacgattccagccgaactcactggatacttccactatctaccaccagataaatataataaccaaacaccaatcatggagtctgagtacttcaacatgccctcttctcctacttcttgttcctccttctaccacctcaatggtctgatcaacaacaacaactactcttcatcatccaatggtcaggatctaatgacgagcaacaactcaacttcagacgaagatcaccaacaaagtatggtcatcgatgagaggaaacaaaggagaatgatctctaacagggaatctgctcgtaggtcaagaatgagaaagcagagacatctcgatgagctttggtctcaagtgataagacttcgcactgataaccactgtcttatggataagctgaaccgcgtatctgaaagccatgagcttgctttaaaggagaacgctaagcttaaagaggaaacttctgatctcagacagctgatctctgagataaagtcacacaacgaagacgacaacagttttttaagagagctcgaagattcgatatcaaactctagatcggattcgaaccaaagcggcagagattttgagttgtgttaa

SEQ ID NO: 111 - DNA, 432 bp, Arabidopsis thaliana
  source 1..432: mol_type = genomic DNA
taagctagaggtttttagttctctgtgtggagtacggctgcattgtttctaccagtaatttgtgggatttccaagctccagtttttcgaatatggcggaagtaagtcttggtatgcttatagacattgtggacgaagagtggatgagggacactttgcctgatgatgatcttccattgcctccagtgcttgctgttaaaactgatgatactgaagaaaccaatcaggaaactcagcaagcagatgctgaaacttggcgtgatctagctcttgatacacagtaatagcctcttaagtacaatggaaaattcttacaagtcttgtttctcgttgtgtatgatcaaaaccaaaactgttcctggctttgtatttttttttggtagaagaggggggcgaacccccatttttattaaaactgaaaaactaaaaaaaa

SEQ ID NO: 112 - DNA, 3538 bp, Arabidopsis thaliana
  source 1..3538: mol_type = genomic DNA
gaagtagaagaagagaagtatctggagagagagaggcgtgcgatttccgcatcgaagaaacagtacggagttttatccgctccgattctgtggaagataatggggaaaggaggtgaagattgcgggaataagcaaactaatagttctgaattggtcaagtctgatacttttcctgcttggggtaaagatgtgtcggaatgcgaagagaagtttggtgttagtcgtgagaaaggtttgagcactgatgaggtgttgaaacggcatcagatctatggtttgaatgaattagagaagcctgagggtacttctatttttaagctgattttggaacagtttaatgatacattggttcgtattcttttggcggctgctgttatttcctttgtcttagccttctttgatggcgacgaaggtggtgagatgggtatcaccgcatttgttgagccgcttgttatttttctcatcttgattgttaatgccattgttggcatctggcaagaaactaatgctgagaaggcgttggaagctttgaaagagattcagtctcagcaagctaccgtcatgcgtgatgggactaaggtttccagtttgcctgcaaaggagcttgttcctggtgatattgtggaactgagggttggtgataaggtgcctgctgatatgcgtgtggttgctttgatcagttcaactttgagagtcgagcaggggtccttaacaggagagagtgaggcagtgagcaaaaccaccaagcacgtggatgagaatgctgatattcaaggaaagaaatgcatggtgtttgcaggaaccactgtcgtgaatgggaactgcatatgtttagttacagatactgggatgaatactgagattggaagggttcactcacagatccaggaagctgcacaacacgaggaagatacccctctgaagaaaaaacttaacgagtttggggaagttctgactatgatcattgggttaatttgtgcgttagtgtggctcatcaatgtcaaatactttctgtcatgggagtatgttgatggctggcccagaaactttaagttctccttcgagaagtgcacatattactttgagattgctgttgcactggcggttgctgcaattccagaaggtctgccagcagttattaccacatgtttggctcttggcactaggaagatggctcagaagaatgctctggttaggaagctacccagtgtggagactcttggatgcaccaccgtgatatgctctgacaaaactggaactcttacaaccaatcagatggctgtttcaaagctcgttgctatgggttcgaggatcggaactcttcgatctttcaatgttgaggggacctcgtttgatcctcgagatggaaagattgaagattggccaacgggtcggatggatgcaaatcttcagatgattgcaaaaattgctgccatttgcaacgatgctaatgttgagaaatctgatcagcaatttgtgtctaggggcatgcctactgaggcagctttgaaggttttggttgagaaaatgggatttcccgaaggattgaatgaagcttcatccgatggcaatgtcttacgttgttgtcggctatggagtgaactagaacaacggattgccacccttgagtttgaccgtgaccggaaatcaatgggagttatggtggattccagctcaggaaagaaactgctactggtcaagggtgccgtagaaaatgtattggaaaggagtacccatattcagctacttgatggttccactcgagagcttgaccaatactcaagggatcttattttacaaagcctacatgatatgtccttgagtgcattaagatgtctcggatttgcatactcagatgttccatcagattttgccacttatgatggcagtgaagaccatcctgctcatcagcaacttctcaacccatccaattattcatcaattgagtccaatctagtatttgttggatttgttggtttaagggatcctccaaggaaagaggtgcgtcaagccattgcagactgcagaacagcaggtattcgggtcatggttatcaccggagacaacaagagcacagcggaagcaatctgccgtgaaattggcgtatttgaagcagatgaagatatctcctcgagaagcttgacaggaaaagaatttatggatgttaaagatcagaagaatcatctaagacagacaggagggctcctgttctcaagggctgaaccaaaacacaaacaagagattgtcaggttactgaaagaagatggagaagtggttgccatgactggagatggagtcaatgatgctcctgccctgaagttggctgatattggtgtggctatgggcatttccgggacagaggtagcaaaggaggcatctgacttggtgttggcagatgataatttcagcaccattgttgcagctgttggtgaaggcaggtccatctataacaacatgaaggccttcatcaggtacatgatctcttccaacatcggtgaggttgcatcgatattcttgacagctgctcttggaatcccagaaggcatgatacccgttcaacttctgtgggtgaatctcgtaacagatggtcctccagctactgctttgggattcaacccccctgacaaggatattatgaaaaagcctcctcgtaggagcgatgactctcttatcactgcgtggatcctcttccgctatatggtgattggtttgtatgtgggagtagcaacggtgggagtattcatcatatggtacacacacaacagctttatgggcatagacctgagccaagacggtcacagccttgtgagctattcacagctcgcacattggggccaatgctcttcatgggaaggcttcaaagtgtctcctttcacagcaggctctcagactttctcgttcgactcaaacccttgcgactattttcagcagggtaaaatcaaggcatccacactctccctctcggtgttggtggccattgaaatgttcaactctctgaatgcactctcagaagatggcagcctggtgacgatgccaccctgggttaacccgtggctgctcctggcaatggctgtctcatttggactccactttgtgatattgtacgtcccattcttggctcaggtgtttggtattgtgccactgagcttgaacgagtggctgctagtgctggctgtgtcgctgccggtaattttgatagacgaagtgctcaagtttgtaggaaggtgcacgagtggctaccgctactcacctcgcactccctcagctaagcaaaaggaggagtaagaaaataattcaaaaggcattattattagactcttagttttagctgaaattaactttgttgctttactcatccttgctatatttaattctccaaacgataatttttggtttgaaaaagaaaagtttctaactttggttcatggacacagcccgtgatagaaagatgaatgtttcaaccaaaccttgattctttatgtaaacttttatggtcgaccaaattggtttttaagactgatggtaatttattttgggc

SEQ ID NO: 113 - DNA, 2087 bp, Arabidopsis thaliana
  source 1..2087: mol_type = genomic DNA
ataaacctacttcctttccttgcttcagctccccttttcttatccggaaaccaaaaacttccggtgataaaacctccttcgtcatctctctacttcttgctgaattttgtctgtctttgaagtggataaaatggcgtcaactttcactgccacatcttctattggttcaatggttgctccgaatggtcacaaatctgataagaaacttatcagcaagttgtcttcaagctcatttggaaggagacaaagtgtgtgtcctagacccagaagatccagttctgcaattgtgtgcgcagcaaaggaattacatttcaacaaagatgggactaccattaggagacttcaagctggtgtcaacaagctcgcagatcttgttggtgttacacttggacccaaaggacgaaatgttgttcttgagagcaagtatggatcaccacgaattgttaatgatggtgtgactgttgcaagagaggttgagttggaagacccggttgagaacattggcgctaagcttgtgaggcaagcggctgccaaaaccaatgacttggctggtgacggtacaacaacatctgttgttcttgcacaaggttttatcgctgagggtgtcaaggtggtagctgctggtgcaaaccctgttttgatcaccagaggtattgagaagacagcaaaggctttggttaccgagctcaagaaaatgtctaaggaggttgaagacagtgaacttgcagatgttgcagctgttagtgcgggtaacaacgacgaaattggaaatatgattgctgaagcaatgagcaaagtgggcaggaaaggtgtggtgacccttgaggagggtaaaagtgccgagaacaacctctacgtcgtagaaggaatgcaatttgaccgtggttatatctctccttactttgtgacagacagcgagaaaatgtccgtcgagttcgacaattgcaagttacttctcgttgacaagaaaattaccaatgcaagggatcttgttggtgttttggaggatgcaattagaggcggatacccaatattaattattgctgaagacattgaacaagaagctttagcgactcttgttgtaaacaagcttagaggtacactgaagatagcagctctcagagctccagggtttggagagcgcaagagccaataccttgatgatattgccattctaactggagcaactgtgatccgtgaggaagttggtctttcacttgacaaagctggaaaagaggttcttggtaatgcttcaaaggttgtcctcacaaaggagacctcgaccatagtgggtgatggaagcacacaggatgcagtgaaaaagcgtgttacacagattaaaaatcttattgagcaagcggagcaagattacgagaaggagaaactcaatgagagaattgcaaagctctctggtggagttgctgtgattcaggttggagcacaaactgagacagaactcaaagagaagaagttgagagttgaagatgctcttaatgcaacaaaggccgctgtcgaggaaggtattgttgttggtggtggttgcactctgcttcgtcttgcttccaaggttgatgccattaaagccacgcttgataatgatgaagaaaaggttggagcggatatagttaaaagagcactaagttaccccctaaaactaatcgccaagaatgctggtgttaatggaagtgtagttagcgagaaggtgctttccaacgataacgtgaaattcggttacaatgctgcaaccggcaagtacgaggatttgatggctgcaggaatcatcgatccaacaaaggttgtgagatgttgcttggaacacgcagcttcggttgcaaagactttcttgatgtcggactgcgttgttgttgagatcaaggaacctgaaccagttcccgtcggcaacccaatggacaactcaggatatggatactaagaggagataggctaatattgaaacggattactttagcttgcgagtgtaatgattttgaacaagagaatgtgtaatgtgaaactgaaattttgaattaatcatcatatgaataaatcatgattccctcaatgcttcgaaatatctcgaaatcgcc

SEQ ID NO: 114 - DNA, 2093 bp, Arabidopsis thaliana
  source 1..2093: mol_type = genomic DNA
ttaaaagcaccttccaagcgagagtaaggagataaacctacttcctttccttgcttcagctccccttttcttatccggaaaccaaaaacttccggtgataaaacctccttcgtcatctctctacttcttggataaaatggcgtcaactttcactgccacatcttctattggttcaatggttgctccgaatggtcacaaatctgataagaaacttatcagcaagttgtcttcaagctcatttggaaggagacaaagtgtgtgtcctagacccagaagatccagttctgcaattgtgtgcgcagcaaaggaattacatttcaacaaagatgggactaccattaggagacttcaagctggtgtcaacaagctcgcagatcttgttggtgttacacttggacccaaaggacgaaatgttgttcttgagagcaagtatggatcaccacgaattgttaatgatggtgtgactgttgcaagagaggttgagttggaagacccggttgagaacattggcgctaagcttgtgaggcaagcggctgccaaaaccaatgacttggctggtgacggtacaacaacatctgttgttcttgcacaaggttttatcgctgagggtgtcaaggtggtagctgctggtgcaaaccctgttttgatcaccagaggtattgagaagacagcaaaggctttggttaccgagctcaagaaaatgtctaaggaggttgaagacagtgaacttgcagatgttgcagctgttagtgcgggtaacaacgacgaaattggaaatatgattgctgaagcaatgagcaaagtgggcaggaaaggtgtggtgacccttgaggagggtaaaagtgccgagaacaacctctacgtcgtagaaggaatgcaatttgaccgtggttatatctctccttactttgtgacagacagcgagaaaatgtccgtcgagttcgacaattgcaagttacttctcgttgacaagaaaattaccaatgcaagggatcttgttggtgttttggaggatgcaattagaggcggatacccaatattaattattgctgaagacattgaacaagaagctttagcgactcttgttgtaaacaagcttagaggtacactgaagatagcagctctcagagctccagggtttggagagcgcaagagccaataccttgatgatattgccattctaactggagcaactgtgatccgtgaggaagttggtctttcacttgacaaagctggaaaagaggttcttggtaatgcttcaaaggttgtcctcacaaaggagacctcgaccatagtgggtgatggaagcacacaggatgcagtgaaaaagcgtgttacacagattaaaaatcttattgagcaagcggagcaagattacgagaaggagaaactcaatgagagaattgcaaagctctctggtggagttgctgtgattcaggttggagcacaaactgagacagaactcaaagagaagaagttgagagttgaagatgctcttaatgcaacaaaggccgctgtcgaggaaggtattgttgttggtggtggttgcactctgcttcgtcttgcttccaaggttgatgccattaaagccacgcttgataatgatgaagaaaaggttggagcggatatagttaaaagagcactaagttaccccctaaaactaatcgccaagaatgctggtgttaatggaagtgtagttagcgagaaggtgctttccaacgataacgtgaaattcggttacaatgctgcaaccggcaagtacgaggatttgatggctgcaggaatcatcgatccaacaaaggttgtgagatgttgcttggaacacgcagcttcggttgcaaagactttcttgatgtcggactgcgttgttgttgagatcaaggaacctgaaccagttcccgtcggcaacccaatggacaactcaggatatggatactaagaggagataggctaatattgaaacggattactttagcttgcgagtgtaatgattttgaacaagagaatgtgtaatgtgaaactgaaattttgaattaatcatcatatgaataaatcatgattccctcaatgcttcgaaatatctcgaaatcgcc

SEQ ID NO: 115 - DNA, 1960 bp, Arabidopsis thaliana
  source 1..1960: mol_type = genomic DNA
gtgaacgaagataaatttcgctattcctctctctctctctctctctctctctctctctctctctcttcttcttcttctccgttcgtgctctggactcgctcgaaatcgatccgatgataatttatgcagctcgaaacttaatttagaatcatacctttttctggatttggctgacgaatccgttttcaattgcacgagttgcttcgccaggtttatcaacttaagaatgtctaattatcaaggggatgatgctgagtacatggaagatgtggatgatgaaatggatgaggatgatttagatgaggattttcgtggggatgatatggctgcctctgattccgatgtcgatgagtttgactactctaataataaaatagctgacacttcagctgaccaagcccggaaagggaaagacatccaggggattccttgggacaggcttagtattacgagagagacatacagacaaactagactagaacagtataaaaattatgaaaatgtccctaactctggggaatcttcagggaaagattgcatggccacacagaaaggggctcttttttatgatttctggcggaatacaagatctatcaaatcaagtattcttcatttccagttgaggaatttggtttgggcaacttctaagcacgatgtctaccttatgtcacaatatttggtgagccactattctactttgacatccggaaagcatgatgttctcaatgttcaaggtcatgtttccccatctgagaaacatcctggaagtttgttggagggatttacaaagactcaagtgagtacactcgcagtgagagataaatttttagttgccggtggatttcaaggagaacttatatgcaagcatcttgatagacctggtgtgagcttttgttcacgtactacttatgatgataatgctataaccaatgctattgagatttataacaaacccagtggggcacttcattttactgcgtcgaataatgattgtggagtcagagattttgatatggagagataccagcttgttaaccagtttcgctttccatggccggtgaatcacacatctttaagtcctgatggtaaattgttgacgattgtgggagacaaccctgaaagccttctggtagaccccaacactggaaagacactggcaacgctatcaggacatctggacttttcctttgcatcagcatggcacccagatggattcacgttctccacaggtaaccaggacaagacctgccgggtttgggacattcgtaacctgtcaaaatctgttgctgtcttgaggggtaaccttggagcaatccgatccattcgctacacatctgatgggaagtacatggccatggctgagccggctgactttgtccatgtgtatgatgtctcaaacgggtatgaaacggagcaagagatcgacttctttggggagatctcgggaatatcatttagccccgacacagaagcactcttcataggcgtttgggaccgcacttacggaagtctaattgagtatagccggcgccacaactactcctaccttgattcatttctatgatcacccgacataccagaggaataaaagagccgatacatatgtgctgctgcactctcctgtcgctctgttaaactaagaaacccgagaaaagagaaaacataaactcaagtcgatctctaatggtgtaaatgatgtgttgtgcaagtactagtaggaatgttgtcacagagagcggatttagttagttaatgttcatttcttgtatgagtgttggagttcgtgtattgtacataagtatatgaggttcgggtgagtttgcatcaagtctcaactcttggcaaagagacaactttactcgagtctgtggctcgttatttggctatggtcacttgtagaggaactcaatttgagatgtttctgccgattgttggatcaaattatatatcatgatgtttc

SEQ ID NO: 116 - DNA, 2741 bp, Arabidopsis thaliana
  source 1..2741: mol_type = genomic DNA
aatcggcgcgtgatcgagaaagatcttctttaacctctttgcaacaaatctactcaaaaccctaacccctttttcaaattacttccatctttagatcgaatcaaatcaatgtccgtcgacgatctccctccgtcgtcggcctccgccgtaacgccactaggctcctccgtgattccgattgtgaacaagctccaagacatattcgctcagctaggaagtcaatcgacgatcgctcttccgcaagtagctgtcgtcggaagtcaaagcagtggcaaatccagcgttctagaagctctcgtcggccgtgactttcttcctcgtggcaatgatatttgcacgcgccgacctctccgtctccagcttgttcagacgaaacctagctctgatggtggatccgatgaagagtggggcgagtttcttcaccacgatcctgttagacgtatctacgatttctctgagattcgccgtgagattgaggcggagactaatagagtatcaggagagaacaaaggtgtatcagatattccgattggtttgaagatattttcacctaatgttttggatattagtcttgtggatcttcctggtatcactaaggttcctgttggtgatcagccaagtgatatcgaagcgcgtataagaacgatgatcttgacttacattaaggaacctagttgcttgatacttgctgttagccctgctaatactgatttagcaaattcagatgcattacaaatcgcaggaaatgctgatcctgatggtcatagaaccataggtgtaatcacaaagttggatattatggacagaggtactgatgctcggaatcaccttctgggaaaaacaattcctcttcgacttggatacgtgggagttgtaaatcgtagtcaagaggatattttgatgaaccgtagcatcaaggatgctcttgttgcagaggaaaagttctttcgtagtcgtccagtttacagcggtctcacagatcgtttgggtgtccctcaactggcaaagaaattaaatcaggtccttgttcaacacatcaaggcactgcttcctagtttaaagtcacgtatcaacaatgcattgtttgctacagcaaaggagtatgagagctatggggatataacagagtctaggggtggtcaaggagctcttctcctcagttttattacaaaatactgcgaagcatactcctctaccctggaagggaaaagtaaagaaatgtcaacatctgagctctcgggtggagcaagaattctctacattttccaatcagtatttgttaagagcttagaggaggttgatccatgtgaagacttaacagctgatgatattcggactgcaatacaaaatgcaactggtcccagatctgcattatttgttccagatgttccatttgaagttcttgtcaggaggcaaatatctcgtttattagatcccagccttcagtgcgctaggttcatcttcgatgagctagtaaagattagtcatcagtgtatgatgaaagagttacagcggtttccagtcctgcaaaagcgcatggatgaggttattgggaactttctgcgagaaggtcttgaaccttcgcaggcaatgatccgagatcttattgaaatggagatggattatataaacacctcacacccaaattttatcgggggaactaaagccgtggagcaagcaatgcaaacagtcaaatcttctaggattccgcatcctgttgcgcggccaagggatactgtggagcctgagaggacggcttcttccgggagtcaaataaaaacccgatcttttctcggccgacaagctaatggaatcatcactgatcaggcagttccaactgcagcagatgctgaaagacctgcaccagctggaagcacaagctggagtggtttctcatcaatttttcgggggagtgatggtcaggcagctgctaaaaacaacctattaaacaaaccattcagcgaaactactcaagaagtgtatcagaacttgtcaacaatctatttaaaggagcctccaactattttgaagtcatctgaaactcattcagaacaggagtcagttgagattgagataacaaagctattattgaaatcctactatgacattgtaaggaagaatgtcgaggacttggtcccaaaagcaatcatgcattttctggtaaattacacgaaacgtgagctgcacaatgttttcatcgagaagctttacagggagaacttaattgaagaactgttgaaagagcccgatgagttagcgataaagaggaaacgcacgcaagagactcttcgcattcttcagcaggctaatcggacgttagacgagctgccgttagaagctgaatcggtcgagagaggttacaaaattggttcagaagcgaaacatgaggagttaccgggcacaagaagatcaaggacagaaactaatgggaacggacggcttcatatgtaaattcaaattgtgattgcacgcatgactcattcatttggtgatggaaaagatttgttttcttccctttaaatcggttgtgcgtggggaaagaaaggtgttcttaggtatagtgaaacgtgatgataaacagaggttttgttgtgagggtattatcaacctactggaaaatgtgacttaatatttgtttctcaaaaccgagaagaataatcaattcctaattttacttttcatagctttatttgttacgaaaaacaagaacgtacatgagacaatgtaatgataaatttatc

SEQ ID NO: 117 - DNA, 2749 bp, Arabidopsis thaliana
  source 1..2749: mol_type = genomic DNA
gagaaagatcttctttaacctctttgcaacaaatctactcaaaaccctaacccctttttcaaattacttccatctttagatcgaatcaaatcaatgtccgtcgacgatctccctccgtcgtcggcctccgccgtaacgccactaggctcctccgtgattccgattgtgaacaagctccaagacatattcgctcagctaggaagtcaatcgacgatcgctcttccgcaagtagctgtcgtcggaagtcaaagcagtggcaaatccagcgttctagaagctctcgtcggccgtgactttcttcctcgtggcaatgatatttgcacgcgccgacctctccgtctccagcttgttcagacgaaacctagctctgatggtggatccgatgaagagtggggcgagtttcttcaccacgatcctgttagacgtatctacgatttctctgagattcgccgtgagattgaggcggagactaatagagtatcaggagagaacaaaggtgtatcagatattccgattggtttgaagatattttcacctaatgttttggatattagtcttgtggatcttcctggtatcactaaggttcctgttggtgatcagccaagtgatatcgaagcgcgtataagaacgatgatcttgacttacattaaggaacctagttgcttgatacttgctgttagccctgctaatactgatttagcaaattcagatgcattacaaatcgcaggaaatgctgatcctgatggtcatagaaccataggtgtaatcacaaagttggatattatggacagaggtactgatgctcggaatcaccttctgggaaaaacaattcctcttcgacttggatacgtgggagttgtaaatcgtagtcaagaggatattttgatgaaccgtagcatcaaggatgctcttgttgcagaggaaaagttctttcgtagtcgtccagtttacagcggtctcacagatcgtttgggtgtccctcaactggcaaagaaattaaatcaggtccttgttcaacacatcaaggcactgcttcctagtttaaagtcacgtatcaacaatgcattgtttgctacagcaaaggagtatgagagctatggggatataacagagtctaggggtggtcaaggagctcttctcctcagttttattacaaaatactgcgaagcatactcctctaccctggaagggaaaagtaaagaaatgtcaacatctgagctctcgggtggagcaagaattctctacattttccaatcagtatttgttaagagcttagaggaggttgatccatgtgaagacttaacagctgatgatattcggactgcaatacaaaatgcaactggtcccagatctgcattatttgttccagatgttccatttgaagttcttgtcaggaggcaaatatctcgtttattagatcccagccttcagtgcgctaggttcatcttcgatgagctagtaaagattagtcatcagtgtatgatgaaagagttacagcggtttccagtcctgcaaaagcgcatggatgaggttattgggaactttctgcgagaaggtcttgaaccttcgcaggcaatgatccgagatcttattgaaatggagatggattatataaacacctcacacccaaattttatcgggggaactaaagccgtggagcaagcaatgcaaacagtcaaatcttctaggattccgcatcctgttgcgcggccaagggatactgtggagcctgagaggacggcttcttccgggagtcaaataaaaacccgatcttttctcggccgacaagctaatggaatcatcactgatcaggcatttccaactgcagcagatgctgaaagacctgcaccagctggaagcacaagctggagtggtttctcatcaatttttcgggggagtgatggtcaggcagctgctaaaaacaacctattaaacaaaccattcagcgaaactactcaagaagtgtatcagaacttgtcaacaatctatttaaaggagcctccaactattttgaagtcatctgaaactcattcagaacaggagtcagttgagattgagataacaaagctattattgaaatcctactatgacattgtaaggaagaatgtcgaggacttggtcccaaaagcaatcatgcattttctggtaaattacacgaaacgtgagctgcacaatgttttcatcgagaagctttacagggagaacttaattgaagaactgttgaaagagcccgatgagttagcgataaagaggaaacgcacgcaagagactcttcgcattcttcagcaggctaatcggacgttagacgagctgccgttagaagctgaatcggtcgagagaggttacaaaattggttcagaagcgaaacatgaggagttaccgggcacaagaagatcaaggacagaaactaatgggaacggacggcttcatatgtaaattcaaattgtgattgcacgcatgactcattcatttggtgatggaaaagatttgttttcttccctttaaatcggttgtgcgtggggaaagaaaggtgttcttaggtatagtgaaacgtgatgataaacagaggttttgttgtgagggtattatcaacctactggaaaatgtgacttaatatttgtttctcaaaaccgagaagaataatcaattcctaattttacttttcatagctttatttgttacgaaaaacaagaacgtacatgagacaatgtaatgataaatttatcactggtaagttgatcttgttctt

SEQ ID NO: 118 - DNA, 2836 bp, Arabidopsis thaliana
  source 1..2836: mol_type = genomic DNA
gagaaagatcttctttaacctctttgcaacaaatctactcaaaaccctaacccctttttcaaattacttccatctttagatcgaatcaaatcaatgtccgtcgacgatctccctccgtcgtcggcctccgccgtaacgccactaggctcctccgtgattccgattgtgaacaagctccaagacatattcgctcagctaggaagtcaatcgacgatcgctcttccgcaagtagctgtcgtcggaagtcaaagcagtggcaaatccagcgttctagaagctctcgtcggccgtgactttcttcctcgtggcaatgatatttgcacgcgccgacctctccgtctccagcttgttcagacgaaacctagctctgatggtggatccgatgaagagtggggcgagtttcttcaccacgatcctgttagacgtatctacgatttctctgagattcgccgtgagattgaggcggagactaatagagtatcaggagagaacaaaggtgtatcagatattccgattggtttgaagatattttcacctaatgttttggatattagtcttgtggatcttcctggtatcactaaggttcctgttggtgatcagccaagtgatatcgaagcgcgtataagaacgatgatcttgacttacattaaggaacctagttgcttgatacttgctgttagccctgctaatactgatttagcaaattcagatgcattacaaatcgcaggaaatgctgatcctgatggtcatagaaccataggtgtaatcacaaagttggatattatggacagaggtactgatgctcggaatcaccttctgggaaaaacaattcctcttcgacttggatacgtgggagttgtaaatcgtagtcaagaggatattttgatgaaccgtagcatcaaggatgctcttgttgcagaggaaaagttctttcgtagtcgtccagtttacagcggtctcacagatcgtttgggtgtccctcaactggcaaagaaattaaatcaggtccttgttcaacacatcaaggcactgcttcctagtttaaagtcacgtatcaacaatgcattgtttgctacagcaaaggagtatgagagctatggggatataacagagtctaggggtggtcaaggagctcttctcctcagttttattacaaaatactgcgaagcatactcctctaccctggaagggaaaagtaaagaaatgtcaacatctgagctctcgggtggagcaagaattctctacattttccaatcagtatttgttaagagcttagaggtaatcactgtgtgtagatatctttgtttagttagtggggctatttgcacggaaggcagacagttcgtttcaggttttcagttcttggaagttgatccatgtgaagacttaacagctgatgatattcggactgcaatacaaaatgcaactggtcccagatctgcattatttgttccagatgttccatttgaagttcttgtcaggaggcaaatatctcgtttattagatcccagccttcagtgcgctaggttcatcttcgatgagctagtaaagattagtcatcagtgtatgatgaaagagttacagcggtttccagtcctgcaaaagcgcatggatgaggttattgggaactttctgcgagaaggtcttgaaccttcgcaggcaatgatccgagatcttattgaaatggagatggattatataaacacctcacacccaaattttatcgggggaactaaagccgtggagcaagcaatgcaaacagtcaaatcttctaggattccgcatcctgttgcgcggccaagggatactgtggagcctgagaggacggcttcttccgggagtcaaataaaaacccgatcttttctcggccgacaagctaatggaatcatcactgatcaggcagttccaactgcagcagatgctgaaagacctgcaccagctggaagcacaagctggagtggtttctcatcaatttttcgggggagtgatggtcaggcagctgctaaaaacaacctattaaacaaaccattcagcgaaactactcaagaagtgtatcagaacttgtcaacaatctatttaaaggagcctccaactattttgaagtcatctgaaactcattcagaacaggagtcagttgagattgagataacaaagctattattgaaatcctactatgacattgtaaggaagaatgtcgaggacttggtcccaaaagcaatcatgcattttctggtaaattacacgaaacgtgagctgcacaatgttttcatcgagaagctttacagggagaacttaattgaagaactgttgaaagagcccgatgagttagcgataaagaggaaacgcacgcaagagactcttcgcattcttcagcaggctaatcggacgttagacgagctgccgttagaagctgaatcggtcgagagaggttacaaaattggttcagaagcgaaacatgaggagttaccgggcacaagaagatcaaggacagaaactaatgggaacggacggcttcatatgtaaattcaaattgtgattgcacgcatgactcattcatttggtgatggaaaagatttgttttcttccctttaaatcggttgtgcgtggggaaagaaaggtgttcttaggtatagtgaaacgtgatgataaacagaggttttgttgtgagggtattatcaacctactggaaaatgtgacttaatatttgtttctcaaaaccgagaagaataatcaattcctaattttacttttcatagctttatttgttacgaaaaacaagaacgtacatgagacaatgtaatgataaatttatcactggtaagttgatcttgttctt

SEQ ID NO: 119 - DNA, 3430 bp, Arabidopsis thaliana
  source 1..3430: mol_type = genomic DNA
aaactaaaataaataaggaaaacactcttcttcaaatccagtagagagattcaagacgagtctcatcgaaagttcgaatctttcgtcatctgattagctttctcttagggtttatttcgatttcgatttagtgttctccatcaatggcgacacccatggttagttccgctggaggattactagcaatgctcaacgagcctcatcctgttttgaagcttcatgcgctctctaacctcaacaatttggttgaccaattctggcctgagatctccactagtgtccccatcattgagagtttatatgaagatgaagaattcgatctgcatcaaagacagcttgctgctttgctggtctctaaggttttctattacttgggcgagcttaatgattcgctgtcttatgccctaggagccggtcccttatttgatgtttcagaggattctgattatgttcatacgcttctggccaaagcaatagacgaatatgccagtctcagatcaaaggcagttgagtcaaatgagatggtggacattgatcccaggctagaggcgattgttgaaagaatgcttggaaaatgcatcagtgatgggaagtatcaacaagccatgggcattgcgatagaatgccggagattggataagttggaagaagctatcattaagagcgataatgttcagggaactttatcatattgcatcaatgtttctcattcctttgtcaaccgcagagagtacagacatgaggtgcttagtttacttgtaaaagtctaccagaagctgccctctcctgattatttgagcatttgtcaatgcctcatgtttttggatgaaccgcaaggtgttgcaagcatattggagaagcttcttcgctcagagaacaaggatgatgctttattggcattgcaaattgcatttgatcttgtagagaacgagcaccaggcctttctcttgagtgttagagatcgccttccagctcccaaaacacgtgctgtagaagcaactcaggctgttgaaacaactattgctcctaatgagaacccttcgggagatgttcagatggcagatgaaactccagctcagacaattgtgcatgagacggatccagttgatgctacatatgctgagaggttaacaaagattaagggaattttatctggagagacatctattcagctgacactgcagtttctttacagccacaacaaatcggacctgctgatactgaagacaatcaaacagtctgtagagatgcggaacagtgtatgccacagtgctacaatatatgctaatgccattatgcatgctggaactacagtggacactttccttagagagaatttggattggctaagcagggcaaccaattgggctaagttcagtgctaccgcgggattaggtgttattcacagaggtcacctgcaacagggtaggtcattgatggctccatacttgcctcagggaggagcaggtggtggtgggagtccttattccgaaggaggtgctttatatgctcttggccttattcatgctaaccatggcgagggaatcaagcaatttctacgtgatagcctacgcagcactaatgttgaggtcattcaacatggagcttgtttaggtcttggcttgtcagctctcgggacagctgatgaagagatatatgatgatgtcaaaagcgtgctttatactgacagtgcagttgctggtgaagctgctggcatcagcatgggtttattattggttggaactgctactgaaaaggcaagtgagatgctcgcttatgctcatgagacacaacatgagaagataataaggggattggctctaggaatagctcttacagtatatggtagagaagaaggagcagataccttgattgagcagatgacgagagatcaggatccaatcattcgttatggtggcatgtacgcattggcattggcttacagtggaaccgcaaacaacaaggcaattcgacaattgctgcactttgctgtatctgatgtcagtgatgatgttaggaggactgccgttctggcacttggatttgtcttgtactctgatccagagcagactccccgtattgtatcactgctttctgagtcatacaatccacatgttcgctatggtgcggctcttgcagtgggtatttcttgtgcaggcactggcctcagcgaagcgatatccttgttggagccacttacatcagatgttgttgactttgttcgtcaaggtgctttgattgcaatggccatggtgatggttcaaattagcgaagctagcgattctcgtgttggagtatttaggcgccaacttgagaagattatacttgacaagcacgaagatacaatgagcaagatgggagcgattctggcctctggtatccttgatgctggtggtaggaacgttactataagactgctctctaagaccaaacatgacaaagtcactgctgttatcggccttgcagtcttcagccagttttggtattggtacccactgatctatttcattagtttggccttctcaccaaccgctttcatcggtttgaactatgaccttaaggtcccaaagtttgagttcatgtcacatgcaaaaccgtctttatttgagtacccaaaacccaccacggttcctacagccaataccgccgttaaacttccaaccgctgttctctcaacttcagttaaagccaaagctagggctaagaaagaagcagagcaaaaagctattgctgagaaaacatctggccctgaaaagcctgtcaatgaaagtggatctggaaaaggaaaagcatcaactgagaaggaaggagactctatgcaggtcgatagcccagcagcggtcgagaagaaagcacctgagcctgagccagcgtttgagattttagtgaacccagctcgagtagtcccagctcaagagaaatacataaagttacttgatgacagcagatatgtaccagtgaagctagcaccgtcaggtttcgttcttctcaaagacttgcgtgaacacgagccagaggttctctctctgaccgacgcaccaacttcaacagcttctcctgcaactggtacagcagcggctgcacaaggaaccccggcctcagctatggccgtagatgatgagccacaacctccacaagcctttgaatacgcttcatgattttatttcatttaaaattagtgggaatttgttgttggttttattggtttctgttgaaagacaaaaggcagagagaaaaacagatctttgaactttgagataactgcttcttgtcatttgcaactggtttcatgttcaactacgatcttgtattaggtacttctctttttaagtattatctaaataattaagtgtcgttttatgtcttttagtggtactggtatatctgatttcttctacaacaagatagtaataaactacattttctaagt

SEQ ID NO: 120 - DNA, 1570 bp, Arabidopsis thaliana
  source 1..1570: mol_type = genomic DNA
cctcttcctcttcaagccacaaagactcataaaaatccaacctttttctcatttcctctgttaaatttttcctgaaaagtttattcctttttctacagatcgaatttcgtagttctcacctcactgaatctgttactttctctataatctaaatcttcaaaaatgtttctggttttgtgaaatcaacacttaaaaactcgagcttttacctcctctgttttttcaaagataaaaatgagagaagacgattcagactggttcgcaagatgggaagaagaacttccatcaccagaagagctcatgccaatatcacaatctctaatctcacccgatctagctctagccttcgatatacgaaccccaaatcacggaaacggaaactcaaaccaacctcatcatcatcatcatcaccaaaccacacctcctacaccgtctcagcttcagcttccatcttctcaagccaattcctcagccgaattcgctgcagattcagcagatctaggctccggaggagctgccggagacgaaccagctcggactttaaaacgacctcgtcttgtctggacaccgcagctgcataaacgtttcgttgatgctgttgcgcatttagggattaagaacgcagttcctaaaacgattatgcagcttatgagtgttgatggtttaactagagaaaacgttgcgagtcatttgcaaaagtatagactttatcttaagagaatgcaaggtttgtcttctggtggtggtgctggttcagatccagctactgatcgtcttttcgctagctctcctgttcctgctcactttcttcatcctaatcgtgttcccagttctgatcatttcatgccgtcttttgttcctattgctactcttcaacaacaacaacaaatggctgctgctgcggccgctgctgcagcagctaatcctcatttacaaccgcctcagttccaccgtcaaatcgcagctgcgcattttggttcaccgactaatggtggattcagttcaccgacgagtaatggacagtttggatcaccgactagtaatggatttggatcaccgacgactaatgggaagtttgatccttcgttcttggcggtgaggcaaacgcagcagcaaccaattcagagaatgtctacaccatcattgcatagtccagttagtaattacgttgaggatttggaatctgcaaacgctaatggagggagaactgtcttaactttattcccaactcgagacgattaaaaagtcattatctttccggttactagatgttcaaaatgtctctgcagtcatcaagaacatgagtcagctgatcgttcttgtgcatcggttttatccggtggcgtttactctgtgcagtcttatcagtttaacattgatacaatccagcgtcaatgtgtggtcaagttctgtatctgaagctcaagcaccttcaggtcaaggcttgtattaacccttgtagctttcttgtgtaagattaatgtaaagatgagtttacttttgaacgtacatccgtacgaacaaactcaagattggaaaaaagaatgaaaaaaacaaaaacttacttcac

SEQ ID NO: 121 - DNA, 3856 bp, Arabidopsis thaliana
  source 1..3856: mol_type = genomic DNA
cgccggggactttgatatcatctgcgccgaacaaaaactctgcagaaaccctaattttcgtcagtgattgattcttccgtttccaccatggaagaagtatgcgaaggaaaagaattctcattccctcgtcaagaagaagatgtcctctccttctggactgaaatcgatgctttcaagacacagctcaaacgcactgagaatcttcctgagtacatcttctacgacggacctccttttgccaccggacttcctcactacggacatatcctcgctggtacgattaaagatattgtgactcggtatcagaccatgactggtcaccatgtcactcgtcggtttgggtgggattgtcatggcttacctgttgagaatgagattgatcggaaattgaatattaagaggagagatgaagttattaagatgggaattgataagtataatgaagagtgtaggagtattgtgactcgttatgttgctgagtgggagaaggttattactaggtgtggtcgttggattgattttaagaatgattataagactatggatttgccttttatggaaagtgtttggtgggttttttctcagctttgggagaagaatcttgtttacagaggattcaaggttatgccgtacagtactggttgtaagacacctttatctaattttgaagctggtcagaactataaggaagtccctgatcctgaaatcatggtgacttttccggttattggggatcaagataatgctgcttttgtggcatggactactactccgtggactcttccaagcaatcttgctttgtgtgtaaatgcgaagtttgtctatgtgaaggttcgtaacaagaacactggaaaagtgtacattgttgctgaatctcggttgtctgctcttcccactgataagcctaaggccaagttaagtaatggacctgctggtgatactaagaaagcaaatcctaaagctaaaggtgctaaacctgagagtgcagctgattcttatgaagttttggagaaatttaatggagcttccctggttgggaagaagtatgaacctttgtttgattactttagtgatttctcaagtgaggcctttcgagtagtagcagatgattatgtcactgatgacagtggtactggtattgtccactgtgctcctgcctttggtgaagatgattatcgtgtttgtcttttgaacaaaataatcaaaaagggggagaatctagttgttgctgttgatgatgatgggttgtttactgagagaattacccacttcagtggccgttatgtcaaagatgcagacaaggatataattgaagccgttaaggccaagggcaggcttgttaaaacgggaagctttactcactcatacccattttgctggcgatcagacaccccactcatatatagagcagttccaagttggtttgtgcgtgtggagcagttgaaagaaaagttgttaaaaagcaatgaacagacagaatgggtacctggttatgtgaaggataaacgttttcacaattggctcgaaaatgcaagggattgggcaatcagccgaagtagattttggggcacgcctcttccgatatggataagtgatgatggggaggaagttgtgatcatggattccgtagagaagcttgaaaagctctctggtgttaaggtctttgacctgcatcgtcaccatattgatcatattacaattccatctagtcgtggcgatgagtttggtgtgctccgtcgtgtagaagatgtttttgattgttggtttgagagtgggtcaatgccttacgcgtatatccattatccgtttgaaaacaaggagttatttgagaagaactttcctggtgattttgtggctgaaggtcttgatcagactcgtggatggttttatactcttatggtgttgtctactgcattatttgaaaaaccagcgtttaaaaatctgatttgcaatggtcttgtacttgctgaggatgggaaaaagatggctaagaaattacggaattatccaccacctttggaagtcatagatgagtatggggctgatgctgtgcgattgtacctgataaattctccggttgtacgtgctgagccactacgcttcaaaaaagaaggagtactcggtgttgtcaaagatgtattccttccatggtacaatgcatatcggttcctcgttcagaatgcaaagagacttgagactgaaggtggtgtgccctttgttcctactgatctggcaactatacagtcagcaaacattcttgatcagtggattcactcagctacgcagagtcttgttcgttttgtccgcgaggagatggatgcctatcggctttacactgtggttcctcgtctcttgaagttcctcgacaatctcactaacatatatgtcagattcaaccgcaagagattaaaaggccgtacgggggaagatgattgtcacactgctctttcgactctattcaatgtgctccttacttcttgcaaagtgatggccccgtttacacctttcttcactgaaactttgtaccagaatctgcggaaagcgtgtaaaggttctgaggaaagtgttcactactgcagtattccaccaagggaaggaatggaaggggagaggattgagttaagtgttacgaggatgatgaaaatcattgatcttgctcggaacattcgtgagcgtaacaaactacccttgaaaactcctctaaaggaaatgattgtagtccatcccgatgctgatttcttaaatgacataactggagtactaagagagtatgtcttggaagaacttaacgtgagatcgcttgtaccatgcaatgatactctgaagtatgcatcactaaaagcagaaccagatttcagtgtattgggaaagcgacttggaaagtcgatggggcttgttgcaaaggaagttaaagaaatgtctcaaaaagatatcttagcatttgaggaggctggggaagttactattgctaaccacttgctaaaggaaacagatatcaagattgttagggttttcaaacgcccagacgatttgaaagagaatgagattgattcagctggagatggtgatgttttggtgattctggatctacgagcagatgattctttggttgaagcaggttttgcccgtgagattgtaaacaggatccagaaactaaggaaaaagtcaggtctggaaccaacagactttgtggaagtgtacttccaatcattggacgaggatgaatctgtttctaaacaagttctagtctctcaggaacaaaacatcaaggattcaattggctccactttacttttgtctagtttaatgccatcacatgcagtcataatagccgatgagacattcaccccaaaagaaacatccgatgagagtgtcaaaaaggttccaaagttgtcgtataagataagtttggctagaccggctttgaagttcaatgaagaggctgttcttgctttatactcaggagatgtgaaatctgcaaccgggcttcaaacatacttgttatcaagggatcattcgaatttgaagtcagagttccaagccggagatgggaagataactgtaagctgcattgaaaatgtgcctgttgcgactgtggttcttggcgaacatctccatttgagtgtcggcgatgacttattgagcaagaggaacgcatgagccgtccctccggttttgtttgatttattgtggtaacttgggatttatttcccttatttttcttcttccatatcttacctataaactacttatttagattgttgcaaaaagttaaatctcagtgttgagactctcttttactcgttctatttgtacaatactaaacttttattcatctcaaaatttatggttggac

SEQ ID NO: 122 - DNA, 2933 bp, Arabidopsis thaliana
  source 1..2933: mol_type = genomic DNA
atcttctttctatagtttccatgaagtcttcttcttctcagagctacgatgttttccccaacttcagaggggaagatgtccgccactcattagtcagccaccttcgtaaggaacttgatcgcaaattcatcaatacattcaacgacaacaggatcgaaagaagccgcaaaataaccccagagctgttattggctatagaaaactcaaggatctcacttgtcgtcttctctaaaaactatgcttcttccacgtggtgcttagatgaattggtgaagatccaagagtgctatgagaaattggatcaaatggtgattcctattttctacaaagtagatccttctcatgttagaaaacagaccggagagtttggcatggtctttggggagacctgcaagggcagaacagagaatgagaagcgaaaatggatgcgagctctagcagaggtagcacatctagccggagaagatcttcggaactgataagtttcaggtgggtaaacttccgataagtgattgtcggaacagtgtgtatgaggattaaacacagagaaagatcgtgtggtgattgtagtgtcggtaaacaagtttttaaagcctcccagctgtaatgtatcaaccgtcggaaaggggtgggtcccacgagcctgagtaaagacgcgtagcgaagcagaaatgcttgaaaatatcgccaaggatgtttcaaacaaactcttccccccatcaaataatttcagtgacttcgtcgggattgaagctcatatagaggcattgatatcaatgttgcgcttcgactccaagaaagcgcgaatgatagggatttgtgggccttctgaaactggtaagactactataggaagagctttatacagcagactcaaaagcgacttccaccatcgggctttcgtagcatataagagaaaaatacggagcgactatgaccagaagctgtattgggaagaacaatttctatcagaaattctttgtcagaaggatataaagatagaggaatgtggtgcggtggaacaacgactaaagcacacgaaagttcttattgttcttgatgatgttgatgatatagagctactaaaaacgttggtaggacgtatcagatggtttggatctgagagcaaaattgttgtgattactcaaaaaagggaacttctcaaggctcacaacattgcacatgtttatgaagtgggattcccatcagaagaactggctcatcaaatgttttgtcgatatgcttttgggaaaaactctccacctcatggtttcaacgagcttgcagatgaagctgcaaagattgccggtaatcgtcctaaagctctcaagtacgttggttcgtcttttagaagactagacaaggaacaatgggtgaagatgctatcggagttccgtagtaatgggaataaactaaaaatcagctatgatgagttagatggtaaaggtcaagattacgttgcgtgtttaaccaatggttcaaattcccaggtgaaggcagagtggatccacttggcactaggcgtgtctatattacttaacatccgcagtgacggaacgacaattctcaaacatttgagctacaatcgaagcatggcgcaacaagcaaaaatatggtggtatgaaaatttggaaagagtgtgcaagaagtacaatatatgtggcatagatagctcaactgatggtggtggttcaacgtatggacaatgttcaaattcccaatttcaaagaaacatggacgcaagccccgggggaaacaaaaccagtaatcaatccacaaaagattcaccgagagcttctcaagtagagaaggaaaagatcgagtactgtgagccacatgtatatataacacctgccatcttcagtgacggaaccagagctcccaaatacgtggagtctagtagccgaagagtaacccaagtgcaccacgccaaaacatggtggccggagaattgtgaaaaagtgtacgagaaccacaacaacatatatggcatagatagatcaattgacggtggtgataagtttgagggaaaaagtaaagttagtgacggtgggttagacggcaaagatcaaggttcaatgtatggacaaagttcaaattccgagcttcaaataaacatggacgcagacaataggagatgtgaacctgtgagtgagatgcttttcaaaaattacaatgtgtgttcgcctaatgcacatatgcctgcaggtttaaccgatgtaaactgttcaaatccccagtctcaaagaaaattggacgcaagcctaaagaaagacaaaattgtgcatgagtggattcgaaccggtagtggcttcttttttgattttcagggcccaaaatctatagtgagtgctgctcaagtggacgagaaaaatttcgagtactgtgaacaaggtgtgtatataacacttggcatcctcagtggcggaattatagttctcaaacatttggagttcagccgaagaatggcgcaacaagcaaaagtttggtggtcggaaaattggataaaagtgtaccaggagcacaacatatgtggcatagataaatcatttgatggtaggtttgatgatagacgtgtcattcgtcaattaagaccaaactgaagcacggcctggcccttgtaaaagtcaggacttgagctagatacttaagccaagcagatctgtttggctaagtctggtcgggttagcgcgaaattgtcgaaatctgtttaataattgcattcagtgcaagtctttaatttgtacttcatggctttaatacactaattaaacattggatcatttttagttttttcttcttttcaaaatacatatttttctaagttttccaatttagtgattttattagttctttagtagaatactggatcatggacacatgctacaacatgctttgacctaattatgaaatttatcagcgaatatattatg

SEQ ID NO: 123 - DNA, 960 bp, Arabidopsis thaliana
  source 1..960: mol_type = genomic DNA
tcgtcgccgttaaaatctgcgatctcattgctcattggtgaagacaaatccctaattcgtatgtcagattctgtggccggcgatttccctcccgatccacttctcgcctccggagccttcatctcctccgccggtgacggaaccctagacagtagtgcgaaacgacgaccgattcagggaggaatcggaatttctggttcgggagagagcgtacgcatcgggatggctaacggcactgatcaggtgaatcatcagacggaatcgaagtcgcggaagcgtgcggcgcctggagataattggttgcctcctggttggagagttgaagataagattcgaacttccggtgccacagctggttcggtggataagtactattacgaaccaaatacaggacgtaagtttcggtccaggactgaggtgctgtactacttggaacatggaacttctaaaagaggcaccaagaaagctgagaatacatatttcaatccagaccattttgaaggccaaggaagcaatagagtcaccagaaccgctacagtgcctccacctccgccaccgccattggactttgattttaagaatccaccagacaaggtaagctggtctatggcaaacgcaggagaagaaggttggatacctaatattggggacgtcaaggttcaagactcagtgagacgagattggagcactgcgtttacctttatcacaagccgaaaccctagtaaagtgtcggcttgaagactatgatgacctggtggcgatttttgggttgttgcatctatggtaagatacacagatatgttagggttacttaattggataattcttgtttagtcttcattcatcaatcatcaagttatgtgtactataatttttgtagcggtttttggaagaatatgataaggggatatgcatctttgtgtttgcttttggaacgtgataaccattcgacttttgact

SEQ ID NO: 124 - DNA, 464 bp, Cardiovirus A
  source 1..464: mol_type = other DNA
gagggcccggaaacctggccctgtcttcttgacgagcattcctaggggtctttcccctctcgccaaaggaatgcaaggtctgttgaatgtcgtgaaggaagcagttcctctggaagcttcttgaagacaaacaacgtctgtagcgaccctttgcaggcagcggaaccccccacctggcgacaggtgcctctgcggccaaaagccacgtgtataagatacacctgcaaaggcggcacaaccccagtgccacgttgtgagttggatagttgtggaaagagtcaaatggctctcctcaagcgtattcaacaaggggctgaaggatgcccagaaggtaccccattgtatgggatctgatctggggcctcggtgcacatgctttacatgtgtttagtcgaggttaaaaaaacgtctaggccccccgaaccacggggacgtggttttcctttgaaaaacacgatgataat

SEQ ID NO: 125 - DNA, 228 bp, Tobacco mosaic virus
  source 1..228: mol_type = other DNA
atctaagttaggttgtaaacatattagagacgttgttcatttggaagagttacgcgagtctttgtgtgatgtagctagtaacctaaataattgtgcgtatttttcacagttagatgaggccgttgccgaggttcataagaccgcggtaggcggttcgtttgctttttgtagtataattaaatatttgtcagataagagattgtttagagatttgttctttgtttgata

SEQ ID NO: 126 - DNA, 101 bp, Hibiscus chlorotic ringspot virus
  source 1..101: mol_type = other DNA
tagcttgtttgggttctttatcactgtcctgattaaggctgaatcagaacactttcacttccacacacacgacagtagtaagacacaaaatatagtagtta

SEQ ID NO: 127 - DNA, 147 bp, Zea mays
  source 1..147: mol_type = other DNA
agcacaacatttcaaccagaaacactagccgaagcaaatccattccacaagcacctggtgggatcatctcatcatcagaaaccaagagagagattccgtgtccgcttgttgtagtagattgtgaggactgaggaccgagaagcagcc

SEQ ID NO: 128 - DNA, 196 bp, Plautia stali intestine virus
  source 1..196: mol_type = other DNA
aagctgactatgtgatcttattaaaattaggttaaatttcgaggttaaaaatagttttaatattgctatagtcttagaggtcttgtatatttatacttaccacacaagatggaccggagcagccctccaatatctagtgtaccctcgtgctcgctcaaacattaagtggtgttgtgcgaaaagaatctcacttcaa

SEQ ID NO: 129 - DNA, 174 bp, Kashmir bee virus
  source 1..174: mol_type = other DNA
aatttaaatatgttaataatgctgaagacaagtatttcgattattaacctctatatttctatataaagtatctgtgagtctcagtggacatcacagtaaggtcgcagttaacttgtaatcttttcattcctgtgtcggagcagtggtaatggagccggacgatttcgccaaaac

SEQ ID NO: 130 - DNA, 204 bp, Solenopsis invicta virus 1
  source 1..204: mol_type = other DNA
aacgtttctcttctggttaccagcaacataggaaattgtcgttgaactacatgttgtaaggctttagagaaataagggagtgtcctatttaggatgaggtgctccggtggcagccccaccaaaacctctagcgactaggaacagctatatcgggttgctatagcagtcaggatgtcattctggcgttccgaaatacccaaacct

SEQ ID NO: 131 - DNA, 178 bp, Triatoma virus
  source 1..178: mol_type = other DNA
tgatcttgctttcgtaataaaattctgtacataaaagtcgaaagtattgctatagttaaggttgcgcttgcctatttaggcatacttctcaggatggcgcgttgcagtccaacaagatccagggactgtacagaattttcctatacctcgagtcgggtttggaatctaaggttgactc

SEQ ID NO: 132 - DNA, 211 bp, Cricket paralysis virus
  source 1..211: mol_type = other DNA
taaaaagcaaaaatgtgatcttgcttgtaaatacaattttgagaggttaataaattacaagtagtgctatttttgtatttaggttagctatttagctttacgttccaggatgcctagtggcagccccacaatatccaggaagccctctctgcggtttttcagattaggtagtcgaaaaacctaagaaatttacctgctacatttcaagata

SEQ ID NO: 133 - DNA, 353 bp, Cricket paralysis virus
  source 1..353: mol_type = other DNA
ttcgataccaagagctggtgtctgagggattacgactcgcgtggtcggacagcacatgttagtcatgtattatggtgtttcccaacacgtatctttgctctagtattgaactttagtgatgagtgtacttggcatgtacacctgattagttagcccttgtggatacgccactgccgctcaggtacagtaggacataccccaaatattgggttccactcgtagagaagaaaattagtggcgaaacgtacggtttatgtcaaaggagaaggtgattttaattgcacctgaagcaaccctaggtcttccctttgatgtgagctaataaggagtaaccgattcttacaatgtgatca

SEQ ID NO: 134 - DNA, 232 bp, Hepacivirus C
  source 1..232: mol_type = other DNA
gcctccaggaccccccctcccgggagagccatagtggtctgcggaaccggtgagtacaccggaattgccaggacgaccgggtcctttcttggataaacccgctcaatgcctggagatttgggcgtgcccccgcaagactgctagccgagtagtgttgggtcgcgaaaggccttgtggtactgcctgatagggtgcttgcgagtgccccgggaggtctcgtagaccgtgcacc

SEQ ID NO: 135 - DNA, 116 bp, Turnip crinkle virus
  source 1..116: mol_type = other DNA
ctctctctcactggtcctcctactttgtcatctgattcctgaaatcaaaccgattcacacatcctacaacacacacgactcatcgaagcagcaacacataagcatcaacactggaa

SEQ ID NO: 136 - DNA, 148 bp, Turnip vein-clearing virus
  source 1..148: mol_type = other DNA
gaattcgtcgattcggttgcagcatttaaagcggttgacaactttaaaagaaggaaaaagaaggttgaagaaaagggtgtagtaagtaagtataagtacagaccggagaagtacgccggtcctgattcgtttaatttgaaagaagaaa

SEQ ID NO: 137 - DNA, 579 bp, Rhopalosiphum padi virus
  source 1..579: mol_type = other DNA
gataaaagaacctataatcccttcgcacaccgcgtcacaccgcgctatatgctgctcattaggaattacggctccttttttgtggatacaatctcttgtatacgatatacttattgttaatttcattgacctttacgcaatcctgcgtaaatgctggtatagggtgtacttcggatttccgagcctatattggttttgaaaggacctttaagtccctactatactacattgtactagcgtaggccacgtaggcccgtaagatattataactattttattatattttattcaccccccacattaatcccagttaaagctttataactataagtaagccgtgccgaaacgttaatcggtcgctagttgcgtaacaactgttagtttaattttccaaaatttatttttcacaatttttagttaagattttagcttgccttaagcagtctttatatcttctgtatattattttaaagtttataggagcaaagttcgctttactcgcaatagctattttatttattttaggaatattatcacctcgtaattatttaattataacattagctttatctatttata

SEQ ID NO: 138 - DNA, 367 bp, Homo sapiens
  source 1..367: mol_type = other DNA
aattccagcgagaggcagagggagcgagcgggcggccggctagggtggaagagccgggcgagcagagctgcgctgcgggcgtcctgggaagggagatccggagcgaatagggggcttcgcctctggcccagccctcccgctgatcccccagccagcggtccgcaacccttgccgcatccacgaaactttgcccatagcagcgggcgggcactttgcactggaacttacaacacccgagcaaggacgcgactctcccgacgcggggaggctattctgcccatttggggacacttccccgccgctgccaggacccgcttctctgaaaggctctccttgcagctgcttagacgctggatttttttcgggt

SEQ ID NO: 139 - DNA, 222 bp, Israeli acute paralysis virus
  source 1..222: mol_type = other DNA
gtatagtgttctggaggcatcattctatggttacccatcattagaggaaatttccaataaactctggtgtaaggcttagagtgatggtcgaggtgccctatttagggtgaggagcctcggtggcagccccaccaaatcctctattggataggaacagctgtactgggcagttacagcagtcgtatggtaacacatgcggcgttccgaaataccatgcctggc

SEQ ID NO: 140 - DNA, 174 bp, Drosophila C virus
  source 1..174: mol_type = other DNA
aatgattttgaaacatattaagatgtttatacgagcgtgttgtttactattttcaggatatgtggaagcggttgtgtatgatctatacgcacatttagttcccagagggcgttgtcgtctccccctaagcaagggagaaacacgtggcacatgatcttgcgcttaacgataaaa

SEQ ID NO: 141 - DNA, 190 bp, Black queen cell virus
  source 1..190: mol_type = other DNA
ccaacaatgtgatcttgcttgcggaggcaaaatttgcacagtataaaatctgcaagtagtgctattgttggaatcaccgtacctatttaggtttacgctccaagatcggtggatagcagccctatcaatatctaggagaactgtgctatgtttagaagattaggtagtctctaaacagaacaatttacct

SEQ ID NO: 142 - DNA, 174 bp, Homalodisca coagulata virus 1
  source 1..174: mol_type = other DNA
ttgcctctctcaacaaaaagccaccgacattaagagagagagtattgctgcttagttaactgcaggccctatttagggttaccgcccaggatctgcaacagcattcctgtatcatccagggcaccggtggacttggtgaggattgagttgacctcatcattagagaccagactc

SEQ ID NO: 143 - DNA, 184 bp, Aphid lethal paralysis virus
  source 1..184: mol_type = other DNA
aattactaatttgatctttaggttataatgttaggactataaaaattagcttaatgcatttagtaatttaaggcttagttatttaactttacttatcaagatggccgttggcagccccacgaaatctagattagtccgaatgtcctattttgattaggtggtcagataggtcagaaactcacct

SEQ ID NO: 144 - DNA, 174 bp, Himetobi P virus
  source 1..174: mol_type = other DNA
catccgtaatacaacccggaataacctccaaaccgagaagaactagtctatgaccagacgaaaaggaactagtccctgttcttttcttagggcctttttcacctgggtaaagtgtagttattgcgtataactctggtatcaataccacccggaagaaattatttatctgccatc

SEQ ID NO: 145 - DNA, 174 bp, Mud crab virus
  source 1..174: mol_type = other DNA
catttatttatattaaatactgacactttgcgggttaaaatgtttaatactatttttcaatttgaggttgtatgagataattttgatttctatgttatcattgaataagggagtctggccctaattgatgtacgactcttctttggttgcgacccgagtcccttctacatcaag

SEQ ID NO: 146 - DNA, 642 bp, Cadicivirus A
  source 1..642: mol_type = other DNA
aactctaagccgaacaattatagctaggctttttattatataacattaattaggcattagcgttgtcgccaatctcttggtaatcctaaggatacctttcctgttgactaagatgaagcgccttcggttaccgatgcccggtgtccacgaagccatcgtggtcggccgcgtcccccacctctcccaacttggactccatgttttcagtaggtgtaatgattagtattattgattctgctcgttcaatgtgtttatcttcacgatctgggacccaacacatgcttcactcatgtttaaatgttggttccctcattttgaagacacccaaaccatagagtgcgagaatgaggatttctacttccattctggtaacagaaatgaattcctgcgtgtgtctcgtaaatggaatctttaagaacttcagataaatcgaacaatacactaatacaagttgttttctaccaacatgttcaatgcggctaatctgaccgtggagctgtgaagcgctcaaacccgagtgttgtatacagtcgtaatgcgtaagtccatgaggaaccgactactgttacctctgttggtgtgtttctcctttattctcttttattattatttgttattgcaaatactacaactttgatcaac

SEQ ID NO: 147 - DNA, 130 bp, Arabidopsis thaliana
  source 1..130: mol_type = genomic DNA
gtaaggatttttatgatatagtatgcttatgtattttgtactgaaagcatatcctgcttcattgggatattactgaaagcatttaactacatgtaaactcacttgatgatcaataaacttgattttgcag

SEQ ID NO: 148 - DNA, 91 bp, Arabidopsis thaliana
  source 1..91: mol_type = genomic DNA
gtaacattccttagttacctttcttttctttttccatcataagtttatagattgtacatgctttgagatttttctttgcaaacaatctcag

SEQ ID NO: 149 - DNA, 108 bp, Arabidopsis thaliana
  source 1..108: mol_type = genomic DNA
gtgctcttgaaattggaactcttcttttgttgtctaaacctatcaatttctttgcggaaatttatttgaagctgtagagttaaaattgagtcttttaaacttttgtag

SEQ ID NO: 150 - DNA, 101 bp, Arabidopsis thaliana
  source 1..101: mol_type = genomic DNA
gtaagttgttacttatgattgttttcctctctgctacatgtattttgttgttcatttctgtaagatataagaattgagttttcctctgatgatattattag

SEQ ID NO: 151 - DNA, 121 bp, Arabidopsis thaliana
  source 1..121: mol_type = genomic DNA
gttagtatcatatgaagaaatacctagtttcagttgatgaatgctattttctgacctcagttgttctcttttgagaattatttcttttctaatttgcctgatttttctattaattcattag

SEQ ID NO: 152 - protein, 124 aa, Arabidopsis thaliana
GTAAATCCTGGTCCACACTTTTACGATAAAAACACAAGATTTTAAACTATGAACTGATCAATAATCATTCCTAAAAGACCACACTTTTGTTTTGTTTCTAAAGTAATTTTTACTGTTATAACAG

SEQ ID NO: 153 - protein, 136 aa, Arabidopsis thaliana
GTAAGAGGTCAAAAGGTTTCCGCAATGATCCCTCTTTTTTTGTTTCTCTAGTTTCAAGAATTTGGGTATATGACTAACTTCTGAGTGTTCCTTGATGCATATTTGTGATGAGACAAATGTTTGTTCTATGTTTTAG

SEQ ID NO: 154 - DNA, 150 bp, Arabidopsis thaliana
  source 1..150: mol_type = genomic DNA
gtaagttctgcatttggttatgctccttgcattttaggtgttcgtcgcacttccatttccatgaatagctaagattttttttctctgcattcattcttcttgcctcagttctaactgtttgtggtatttttgttttaattattgctacag

SEQ ID NO: 155 - DNA, 121 bp, Arabidopsis thaliana
  source 1..121: mol_type = genomic DNA
gtaaagcaactgtgttttaatcaatttcttgtcaggatatatggattataacttaatttttgagaaatctgtagtatttggcgtgaaatgagtttgctttttggtttctcccgtgttatag

SEQ ID NO: 156 - DNA, 136 bp, Arabidopsis thaliana
  source 1..136: mol_type = genomic DNA
gtaaagtttccaactttcctttaccatatcaaactaaagttcgaaactttttatttgatcaacttcaaggccacccgatctttctattcctgattaatttgtgatgaatccatattgacttttgatggttacgcag

SEQ ID NO: 157 - DNA, 121 bp, Arabidopsis thaliana
  source 1..121: mol_type = genomic DNA
gtctgtctttcctatttcatatgtttaatcctaggaatttgatcaattgattgtatgtatgtcgatcccaagactttcttgttcacttatatcttaactctctctttgctgtttcttgcag

SEQ ID NO: 158 - DNA, 159 bp, Arabidopsis thaliana
  source 1..159: mol_type = genomic DNA
gtaaaatattggatgccagacgatattctttcttttgatttgtaactttttcctgtcaaggtcgataaattttattttttttggtaaaaggtcgataatttttttttggagccattatgtaattttcctaattaactgaaccaaaattatacaaaccag

SEQ ID NO: 159 - DNA, 109 bp, Arabidopsis thaliana
  source 1..109: mol_type = genomic DNA
gtaaggacttctcatgaatattagtggcagattagtgttgttaaagtctttggttagataatcgatgcctcctaattgtccatgttttactggttttctacaattaaag

SEQ ID NO: 160 - DNA, 189 bp, Solanum tuberosum
  source 1..189: mol_type = genomic DNA
gtttgtttctgcttctacctttgatatatatataataattatcattaagtagtagtaatataatatttcaaatatttttttcaaaataaaagaatgtagtatatagcaattgcttttctgtagtttataagtgtgtatattttaatttataacttttctaatatatgaccaaaacatggtgatgtttag

SEQ ID NO: 161 - DNA, 94 bp, Cucumber mosaic virus
  source 1..94: mol_type = other DNA
gtttatttacaagagcgtacggttcaatccctgcctcccctgtaaaactaccctttgaaaacctctctttcttaatcttttctttgtaattcct

SEQ ID NO: 162 - DNA, 74 bp, Brome mosaic virus
  source 1..74: mol_type = other DNA
gtagaccacggaacgaggttcaatcccttgtcgaccacggttctgctacttgttctttgtttttcaccaacaaa

SEQ ID NO: 163 - DNA, 107 bp, Citrus tristeza virus
  source 1..107: mol_type = other DNA
aatttcacaaattcaacctgttcgcccagaaaatacgtctggcacaacagggatccggaataggtccagcctttaagctctaatattcccacaacaaaaattacact

SEQ ID NO: 164 - DNA, 107 bp, Beet yellows virus
  source 1..107: mol_type = other DNA
gtttttaaccatccttctactagacgtacactcgtacatcctctagtatttcctttatttatcttcccataagcccctgcctttaacgtttaactctcgctatcgac

SEQ ID NO: 165 - DNA, 206 bp, Cowpea mosaic virus
  source 1..206: mol_type = other DNA
tattaaaatcaatacaggttttgataaaagcgaacgtggagaaatccaaacctttctttctttcctcaatctcttcaattgcgaacgaaatccaagctttggttttgctgaaacaaatacacaacgtatactgaatttggcaaatttctctctctctctctgtcattttctttcttctgtcgggactttcttagtcttgacccaac

SEQ ID NO: 166 - DNA, 84 bp, Potato virus X
  source 1..84: mol_type = other DNA
gaaaactaaaccatacaccaccaacacaaccaaacccaccacgcccaattgttacacacccgcttggaaaagcaagtctaacaa

SEQ ID NO: 167 - DNA, 161 bp, Potato virus A
  source 1..161: mol_type = other DNA
aaaataaacaaactacaaaacacaatcaagaaatcaaacgaattagagcaatcaatcttctaaatcttcaagcagttcacaacattttaaacacaatcaaaacttgaacaagttcaatcaaacacccaaattcagtttaaatactcaaaacgcaagcatca

SEQ ID NO: 168 - DNA, 184 bp, Potato virus Y
  source 1..184: mol_type = other DNA
aattaaaacaactcaatacaacataagaaaaacaacgcaaaaacactcataaacgctcattctcactcaagcaacttgctaagtttcagtttaaatcatttccttgcaattctctagaacaatattggaaaccatttcaactcaacaagcaatttcatcacttccaaccaatttcagatcctca

SEQ ID NO: 169 - DNA, 167 bp, Pepper mottle virus
  source 1..167: mol_type = other DNA
aaattaaaacataacatacaacataaacgaaagcaatcaaattttcaagcatttttcttgagctctttgatttttcctgcataaattaagcactttgatcaacaacatagtctcgatttgaatatttcaattgtttccagttttctctaatagcactccatactaaa

SEQ ID NO: 170 - DNA, 190 bp, Bean yellow mosaic virus
  source 1..190: mol_type = other DNA
aaaaaatataaaaactaaacaagacaatacaagacataacgcattcagaccttcaaacattcgcaagctttaaacaactttgtgtgaatttcgagtataagatttctaaaattctaaaattaaagtaattagtctttctttaagtgtcaatcaaatttgagtttttcgttattactattgcaagcttata

SEQ ID NO: 171 - DNA, 91 bp, Barley stripe mosaic virus
  source 1..91: mol_type = other DNA
gtatgtaagttgcctttgggtgtaaaatttcttgcatgcacataatcgtaatcgattcttcttgatctctaaacaacactttcccgttagc

SEQ ID NO: 172 - DNA, 115 bp, Wheat stripe mosaic virus
  source 1..115: mol_type = other DNA
cgaaagttaacactgagtacacacgatcccttgataccagcagcatctgtgagcttgtttggttaggcaacgcgggtcgaggtttactctgattgtacactggaaattatcagca

SEQ ID NO: 173 - DNA, 79 bp, Rice yellow mottle virus
  source 1..79: mol_type = other DNA
acaattgaagctaggaaaggagcatattgcgaaagcatccctccttccgacgaacaattgtagccacactgcatcgtgt

SEQ ID NO: 174 - DNA, 139 bp, Maize dwarf mosaic virus
  source 1..139: mol_type = other DNA
aaaaacaacaagactcaacacaacacaaccaaacacgaccaaacacaaccaaattacacgttattggagcacattcagtttgcaggcaacggttcgtttgcaaggtgcatcgaaaagcctctctgaacacacgatcgca

SEQ ID NO: 175 - DNA, 138 bp, Zucchini yellow mosaic virus
  source 1..138: mol_type = other DNA
aaattaaaacaaatcacaaagactacagaaatcaacgaacaagcagacgatttctaaaccgtgtttacaaacaagcaatctataattcgcacagcatcaagaatttctgcaatcactttgtttattttagacacaaca

SEQ ID NO: 176 - DNA, 132 bp, Watermelon mosaic virus
  source 1..132: mol_type = other DNA
aaattaaaactactcataaagacatcaaacaaaacaaacgcaaacaaattctcaagttttcaagctatttcaagcaatttgcattttcgatatttataagtttacgattcatcaatatcaacaacaacacga

SEQ ID NO: 177 - DNA, 148 bp, Sugarcane mosaic virus
  source 1..148: mol_type = other DNA
aaaacaacaaaactcaatacaacacaacaaaacacatccaagcaaaccaacgacatttgcaatcaaacttcagcgcacggctcaaaagagaaggctctttgagaacgctctctgaacttccctccttcggcattcgacttccggcgag

SEQ ID NO: 178 - DNA, 68 bp, Tobacco mosaic virus
  source 1..68: mol_type = other DNA
gtatttttacaacaattaccaacaacaacaaacaacaaacaacattacaattactatttacaattaca

SEQ ID NO: 179 - DNA, 71 bp, Tomato mosaic virus
  source 1..71: mol_type = other DNA
gtatttttacaacaattaccaacaacaacaacaaacaacaacaacattacattttacattctacaactaca

SEQ ID NO: 180 - DNA, 67 bp, Turnip vein-clearing virus
  source 1..67: mol_type = other DNA
gtttagttttattgcaacaacaacaacaaattacaataacaacaaacaaaatacaaacaacaacaac

SEQ ID NO: 181 - DNA, 69 bp, Pepper mild mottle virus
  source 1..69: mol_type = other DNA
gtaaatttttcacaatttaacaacaacaacacaaacaacaaacaacattacaaacaaaatacaactaca

SEQ ID NO: 182 - DNA, 63 bp, Turnip crinkle virus
  source 1..63: mol_type = other DNA
ggtaatctgcaaatccctggcacccgcctaaaattgccctcatcaaccttctctctattcacg

SEQ ID NO: 183 - DNA, 165 bp, Tomato bushy stunt virus
  source 1..165: mol_type = other DNA
naaattctccaggatttctcgacctagttcgtttatctggtgacttgcgctaccgttgctttgcgtagagaatttctctccataattattatctttagttgtggggtttgaaggttgggtctacctttcggggggataaattgtaacttccaacaaacaagcgac

SEQ ID NO: 184 - DNA, 33 bp, Tomato spotted wilt orthotospovirus
  source 1..33: mol_type = other DNA
agagcaatcaggtaacaacgattttaagcaaac

SEQ ID NO: 185 - DNA, 32 bp, Watermelon bud necrosis orthotospovirus
  source 1..32: mol_type = other DNA
agagcaatcgtgcaacaataagaatatcagta

SEQ ID NO: 186 - DNA, 87 bp, Turnip yellow mosaic virus
  source 1..87: mol_type = other DNA
gtaatcaactaccaattccagctctcttttgacaactggtcttatacccacttccgtacacttgcaaccctcgtaagacaattgcaa

SEQ ID NO: 187 - DNA, 281 bp, Cucumber mosaic virus
  source 1..281: mol_type = other DNA
cggtctccctcttcgggcgggatctgagttggcggtaatctgcaaaccgtctgaagtcactaaacacattgtgtggtgaacgggttgtccatccagctaacggctaaaatggtcagtcgtggagaaatccacgccagtagacttacaagtctctgaggcacctttgaaaccatctcctaggtttcttcggaaggacttcggtccgtgtacttctagcacaacgtgctagtttcagggtacgggtgccccccactttcgtgggggtctctaaaaggagacca

SEQ ID NO: 188 - DNA, 274 bp, Brome mosaic virus
  source 1..274: mol_type = other DNA
tgcgcttgtctctgtgtgagacctctgctcgaggagagccctgttccaggtaggaacgttgtggtctaactcaagactagctgaatcggtgctataaccgatagtcgtggttgacacgcagacctcttacaagagtgtctaggcgcctttgagagttactctttgctctcttcggaagaacccttaggggttcgtgcatgggcttgcatagcaagtcttagaatgcgggtgtcgtacagtgttgaaaaacactgtaaatctctaaaagagacca

SEQ ID NO: 189 - DNA, 273 bp, Citrus tristeza virus
  source 1..273: mol_type = other DNA
ttgaagtggacggaataagttcctcgcggaactttgtgttgggttggtaaagacccttatgatggtgatatatcactagacaataaccggatgggtaaagtctttaaaatgatcgaggggaaaattaaccgtatcctctcgttggtctaagctcccacagagtggtagtggtctcaagtgaggcttaacgtatgcgtgaaccaaagaagttctccttagagtgtgtgttgtttacccaacgcactgtccctatggggggccaacataggtcca

SEQ ID NO: 190 - DNA, 182 bp, Beet yellows virus
  source 1..182: mol_type = other DNA
tagagaagtgacggaggcgacctacctaccgtgtaatttaagtcgtcacagagtgacaacggcaccaagtggtgcttagtgcgtatgtaaattacgaagtgcaaaaaatttttctttttatattaagaaaatttttgcacactcctagcgaagtcccgctaggaagaaaaaataaggggccc

SEQ ID NO: 191 - DNA, 72 bp, Potato virus X
  source 1..72: mol_type = other DNA
ctacgtctacataaccgacgcctaccccagtttcatagtattttctggtttgattgtatgaataatataaat

SEQ ID NO: 192 - DNA, 227 bp, Potato virus A
  source 1..227: mol_type = other DNA
taaccgaagtgccgtactattactaagtaagagttcctgttagtatccttgtcttattattagaatacgtttatctttcaacaagtatgatgttcgtgctctcacctcgcaacagtgagtttgagtgggaaataaatactagtattctatggccttacttgttatatagacccaccacatagtgagattttatctcggtgactggttttatgtttcaactgtcaggg

SEQ ID NO: 193 - DNA, 328 bp, Potato virus Y
  source 1..328: mol_type = other DNA
tgtagtgtctctccggacgatatataagtatttacatatgcagtaagtattttggcttttcctgtactacttttatcataattaataatcgtttgaatattactggcagataggggtggtatagcgattccgtcgttgttagtgaccttagctgtcggttctgtattattaagtcttagataaaaagtgccgggttgttgttgtgtgactgatctatcgattaggtgatgctgtgattctgtcatagcagtgactatgtctggatttagttacttgggtgatgctgtgattctgtcatagcagtgactgtaaacttcaatcaggagac

SEQ ID NO: 194 - DNA, 266 bp, Pepper mottle virus
  source 1..266: mol_type = other DNA
ctgatgtggtctctgggatgaaatattattatatgtagtatgcaatatatagtatggcttttctcgttccagtctttatattaatgagagtaacttaagtaagtaatttgtacttcaaggattaatcaaggtgactctctgacactctcagtgaggtgacttgtttagtctgagtttacttattgtgagtataaagaatctctcagaaaacgagagtgacttctagacacactctaggaggtgatcgtagttggcatgagagagac

SEQ ID NO: 195 - DNA, 171 bp, Bean yellow mosaic virus
  source 1..171: mol_type = other DNA
agtatccgtctttaaattctctataatttggcgttacattacttaatactatgtattagtgaggtttcacctccagcattttaaattcagtatgtgtatcattctctctactctgacagggtaagcagttagtgaggttgcctcgtgtgagcctgatctttgtagagcgag

SEQ ID NO: 196 - DNA, 257 bp, Barley stripe mosaic virus
  source 1..257: mol_type = other DNA
aaaaaaaaaaaaaaaaaaatgtttgatcagatcattcaaatctgatggtgcccatcaaccatatgatgggagtgtttgcaagtccactataatcgaacttgaaaacgatgcctgaattggaaaccatgaatcttaacggattctggagagaaaatttaggaattggtatgtaagctacaacttccggtagctgcgtcacactttaagagtgtgcatactgagccgaagctcagcttcggtcccccaagggaagacca

SEQ ID NO: 197 - DNA, 350 bp, Wheat stripe mosaic virus
  source 1..350: mol_type = other DNA
gcgttgtcactcgtccgaagacgttaaactacggtgtcgttcattcgacgtgagattctgagttatgggtattgctacaaacccacacgaggtggtcgtccgtgcctgacattaagttgttgggatagaccagggcaagtcgggactttggctagaagtttgtgggtaacttcactgttaaaccctctggttcaacgtcagaaccacctaggagataatactctgggtttagttggcgtctgttgtaattatttataattcagcattttaaaatttcaagaaggtctttgaccatatagttgtactgggtgtgagttgtaccagtgtgttgttaactatgtttgtgtata

SEQ ID NO: 198 - DNA, 246 bp, Rice yellow mottle virus
  source 1..246: mol_type = other DNA
atccacggattggctacgagatcgacttaccctgaaaaggatgttgagcgttcttgaacgcggcccaatcctacgagatgatactggtgactatcctacgtgaggagttgcactcacgcttcaacccaaagcgacccatgcactggacagtgcttacccagatggttttcggagctactgggcggacctttcaccaaaccgaattccccactctttccgagagaattctcgggatgggtgggggag

SEQ ID NO: 199 - DNA, 250 bp, Maize dwarf mosaic virus
  source 1..250: mol_type = other DNA
tacggggttcaacttttacgcagtaatttagtaatatataagtaagctattgtggtgaggttgtacctcgttagttttatatatatattatgctacgtacctactatgtctgcaagtgagtgaggttgcacctcgacacttatagtgggcactattactagcttcgaatcacgagacggacggtccattgagtggttctaccacgaggatgcagcgagtttcgtggtgagagacaaaaaaaaaaaaaaaa

SEQ ID NO: 200 - DNA, 213 bp, Zucchini yellow mosaic virus
  source 1..213: mol_type = other DNA
taaagggtaggtcacctacctaggttatcgattcgctgccgacgtaattctaatatttaccgctttttatgatatctttagatttcagtgtgggcctcccacctttaaagcgtaaagtttatgttagttgtccaggaatgccgtagtcctgtcggaagctttagtgtgagcctctcacggataagctcgagattagactccgtttgcaagcct

SEQ ID NO: 201 - DNA, 249 bp, Watermelon mosaic virus
  source 1..249: mol_type = other DNA
agactaggtaaactggtcacagttagcatttcgggtcgttataagttttctataatataatatgttgcactttttagtatagtgtgattttatcacctttgtactgtttatgttagtgtggtttaaccatcttagtgtgctttatattatagtttatgcataacagggagaaccattacaataccggagttgtttgtagtgtgattacatcacggttaatagccgaggtacggtaatgtttgttgtcct

SEQ ID NO: 202 - DNA, 235 bp, Sugarcane mosaic virus
  source 1..235: mol_type = other DNA
tctcctggaaaccctgtttgcagtatctatagtatgttatgtgtactagtattaaaagtgaggctttgtctcgtttctgcttttactatttacgtactataagtgtgaaccagtctgcaagatacagggttggacccagtgtcttctggtgtagcacatactagcgtcgagccatgtcacggacagcgctgaggatggctttgccatgtgtgctgcgagtctcatggtgagagac

SEQ ID NO: 203 - DNA, 204 bp, Tobacco mosaic virus
  source 1..204: mol_type = other DNA
ggtagtcaagatgcataataaataacggattgtgtccgtaatcacacgtggtgcgtacgataacgcatagtgtttttccctccacttaaatcgaagggttgtgtcttggatcgcgcgggtcaaatgtatatggttcatatacatccgcaggcacgtaataaagcgaggggttcgaatccccccgttacccccggtaggggccca

SEQ ID NO: 204 - DNA, 201 bp, Tomato mosaic virus
  source 1..201: mol_type = other DNA
atgcataggtgctgaaatataaattttgtgtttctaaaacacacgtggtacgtacgataacgtacagtgtttttccctccacttaaatcgaagggtagtgtcttggagcgcgcggagtaaacatatatggttcatatatgtccgtaggcacgtaaaaaagcgagggattcgaattcccccggaacccccggttggggccca

SEQ ID NO: 205 - DNA, 235 bp, Turnip vein-clearing virus
  source 1..235: mol_type = other DNA
gcgtagtgcgcacgatagcgcatagtgtttttctctccacttaaatcgaagagataaacttacggtgtaattccgtgagggtggcgtaaaccaaattacgcaatgttttgggttccattaaaatcgaaaccccttatttcctggatcacctgttaacgcacgtttgacgtgtattacagtgggaataagtaaaagtgagaggttcgaatcctccctaaccccgggtaggggccca

SEQ ID NO: 206 - DNA, 199 bp, Pepper mild mottle virus
  source 1..199: mol_type = other DNA
acatgatggcataaataagttgaacgaacattaaacgtccgtggcgagtacgataactcgtagtgtttttccctccacttaaatcgaagggttgtcgttgggatggaacgcaattaaatacatgtgtgacgtgtatttgcgaacgacgtaattatttttcaggggttcgaatcccccccgaaccgcgggtagcggccca

SEQ ID NO: 207 - DNA, 255 bp, Turnip crinkle virus
  source 1..255: mol_type = other DNA
tacggtaatagtgtagtcttctcatcttagtagttagctctctcttatattaagaaaagaaaacaaaaacccccaggtcgctttattttgacctgtgttagggaccaaaaacggtggcagcactgtctagctgcgggcattagactggaaaactagtgctctttgggtaaccactaaaatcccgaaagggtgggctgtggtgaccttccgaactaaaagatagcctccctcctcgcgcggggggggggcctgccc

SEQ ID NO: 208 - DNA, 370 bp, Tomato bushy stunt virus
  source 1..370: mol_type = other DNA
gacagactcttcagtctgagtttgtggagatgagtgtaaatctggcatagcatacaggttactcttgttgggttctggatgttaggatgacgagtcgactcgggctccgcactaggtttggtcgcctaggggatggagatatggaaagggtctcgtgtggtatcagtcggtcgaaagacgcgcttccaacatgggcctatggtcggataagtcttagcaataccagccagcatgaattggattcctgtttacgaaagttaggtgtcacttgtggaagcggacccagacacggttgatctcacccttcggggggctatagagatcgctggaagcactaccggacaaccggaacattgcagaaatgcagccc

SEQ ID NO: 209 - DNA, 241 bp, Tomato spotted wilt orthotospovirus
  source 1..241: mol_type = other DNA
attaatagtaatgctcaacaatgcatggataatggattagatagaacttagaatacaaatttattgttattttagaattaggttagatctgattagactaaagacgatttggtgaaccaaatctatagtgtatgtaaatgtggagtcccggtatagtttcactggagggaattcttatatatcttatttgtaaagtctggttatggagagattatatgttttagttgtacctgattgctct

SEQ ID NO: 210 - DNA, 215 bp, Watermelon bud necrosis orthotospovirus
  source 1..215: mol_type = other DNA
ataagccatagaatagacagtatagaaccagaagcagtaaaagagcatgacaacaaaagggttttttcttttgcaaaaggatgaaagtattctaaatcagtttaaaatgcaatgtagttgtagtatctagaatcaacagtagagtcagaaatagtatttcttaataaaattgagactgagtgtagaatacttttgttttgttgctcgattgctct

SEQ ID NO: 211 - DNA, 105 bp, Turnip yellow mosaic virus
  source 1..105: mol_type = other DNA
gttctcgatctttaaaatcgttagctcgccagttagcgaggtctgtccccacacgacagataatcgggtgcaactcccgcccctcttccgagggtcatcggaacc

SEQ ID NO: 212 - DNA, 4851 bp, Tobacco mosaic virus
  source 1..4851: mol_type = other DNA
atggcatacacacagacagctaccacatcagctttgctggacactgtccgaggaaacaactccttggtcaatgatctagcaaagcgtcgtctttacgacacagcggttgaagagtttaacgctcgtgaccgcaggcccaaggtgaacttttcaaaagtaataagcgaggagcagacgcttattgctacccgggcgtatccagaattccaaattacattttataacacgcaaaatgccgtgcattcgcttgcaggtggattgcgatctttagaactggaatatctgatgatgcaaattccctacggatcattgacttatgacataggcgggaattttgcatcgcatctgttcaagggacgagcatatgtacactgctgcatgcccaacctggacgttcgagacatcatgcggcacgaaggccagaaagacagtattgaactatacctttctaggctagagagaggggggaaaacagtccccaacttccaaaaggaagcatttgacagatacgcagaaattcctgaagacgctgtctgtcacaatactttccagacaatgcgacatcagccgatgcagcaatcaggcagagtgtatgccattgcgctacacagcatatatgacataccagccgatgagttcggggcggcactcttgaggaaaaatgtccatacgtgctatgccgctttccacttctctgagaacctgcttcttgaagattcatacgtcaatttggacgaaatcaacgcgtgtttttcgcgcgatggagacaagttgaccttttcttttgcatcagagagtactcttaattattgtcatagttattctaatattcttaagtatgtgtgcaaaacttacttcccggcctctaatagagaggtttacatgaaggagtttttagtcaccagagttaatacctggttttgtaagttttctagaatagatacttttcttttgtacaaaggtgtggcccataaaagtgtagatagtgagcagttttatactgcaatggaagacgcatggcattacaaaaagactcttgcaatgtgcaacagcgagagaatcctccttgaggattcatcatcagtcaattactggtttcccaaaatgagggatatggtcatcgtaccattattcgacatttctttggagactagtaagaggacgcgcaaggaagtcttagtgtccaaggatttcgtgtttacagtgcttaaccacattcgaacataccaggcgaaagctcttacatacgcaaatgttttgtcctttgtcgaatcgattcgatcgagggtaatcattaacggtgtgacagcgaggtccgaatgggatgtggacaaatctttgttacaatccttgtccatgacgttttacctgcatactaagcttgccgttctaaaggatgacttactgattagcaagtttagtctcggttcgaaaacggtgtgccagcatgtgtgggatgagatttcgctggcgtttgggaacgcatttccctccgtgaaagagaggctcttgaacaggaaacttatcagagtggcaggcgacgcattagagatcagggtgcctgatctatatgtgaccttccacgacagattagtgactgagtacaaggcctctgtggacatgcctgcgcttgacattaggaagaagatggaagaaacggaagtgatgtacaatgcactttcagagttatcggtgttaagggagtctgacaaattcgatgttgatgttttttcccagatgtgccaatctttggaagttgacccaatgacggcagcgaaggttatagtcgcggtcatgagcaatgagagcggtctgactctcacatttgaacgacctactgaggcgaatgttgcgctagctttacaggatcaagagaaggcttcagaaggtgctttggtagttacctcaagagaagttgaagaaccgtccatgaagggttcgatggccagaggagagttacaattagctggtcttgctggagatcatccggagtcgtcctattctaagaacgaggagatagagtctttagagcagtttcatatggcaacggcagattcgttaattcgtaagcagatgagctcgattgtgtacacgggtccgattaaagttcagcaaatgaaaaactttatcgatagcctggtagcatcactatctgctgcggtgtcgaatctcgtcaagatcctcaaagatacagctgctattgaccttgaaacccgtcaaaagtttggagtcttggatgttgcatctaggaagtggttaatcaaaccaacggccaagagtcatgcatggggtgttgttgaaacccacgcgaggaagtatcatgtggcgcttttggaatatgatgagcagggtgtggtgacatgcgatgattggagaagagtagctgtcagctctgagtctgttgtttattccgacatggcgaaactcagaactctgcgcagactgcttcgaaacggagaaccgcatgtcagtagcgcaaaggttgttcttgtggacggagttccgggctgtgggaaaaccaaagaaattctttccagggttaattttgatgaagatctaattttagtacctgggaagcaagccgcggaaatgatcagaagacgtgcgaattcctcagggattattgtggccacgaaggacaacgttaaaaccgttgattctttcatgatgaattttgggaaaagcacacgctgtcagttcaagaggttattcattgatgaagggttgatgttgcatactggttgtgttaattttcttgtggcgatgtcattgtgcgaaattgcatatgtttacggagacacacagcagattccatacatcaatagagtttcaggattcccgtaccccgcccattttgccaaattggaagttgacgaggtggagacacgcagaactactctccgttgtccagccgatgtcacacattatctgaacaggagatatgagggctttgtcatgagcacttcttcggttaaaaagtctgtttcgcaggagatggtcggcggagccgccgtgatcaatccgatctcaaaacccttgcatggcaagatcctgacttttacccaatcggataaagaagctctgctttcaagagggtattcagatgttcacactgtgcatgaagtgcaaggcgagacatactctgatgtttcactagttaggttaacccctacaccagtctccatcattgcaggagacagcccacatgttttggtcgcattgtcaaggcacacctgttcgctcaagtactacactgttgttatggatcctttagttagtatcattagagatctagagaaacttagctcgtacttgttagatatgtataaggtcgatgcaggaacacaatagcaattacagattgactcggtgttcaaaggttccaatctttttgttgcagcgccaaagactggtgatatttctgatatgcagttttactatgataagtgtctcccaggcaacagcaccatgatgaataattttgatgctgttaccatgaggttgactgacatttcattgaatgtcaaagattgcatattggatatgtctaagtctgttgctgcgcctaaggatcaaatcaaaccactaatacctatggtacgaacggcggcagaaatgccacgccagactggactattggaaaatttagtggcgatgattaaaaggaactttaacgcacccgagttgtctggcatcattgatattgaaaatactgcatctttagttgtagataagttttttgatagttatttgcttaaagaaaaaagaaaaccaaataaaaatgtttctttgttcagtagagagtctctcaatagatggttagaaaagcaggaacaggtaacaataggccagctcgcagattttgattttgtagatttgccagcagttgatcagtacagacacatgattaaagcacaacccaagcaaaaattggacacttcaatccaaacggagtacccggctttgcagacgattgtgtaccattcaaaaaagatcaatgcaatatttggcccgttgtttagtgagcttactaggcaattactggacagtgttgattcgagcagatttttgtttttcacaagaaagacaccagcgcagattgaggatttcttcggagatctcgacagtcatgtgccgatggatgtcttggagctggatatatcaaaatacgacaaatctcagaatgaattccactgtgcagtagaatacgagatctggcgaagattgggttttgaagacttcttgggagaagtttggaaacaagggcatagaaagaccaccctcaaggattataccgcaggtataaaaacttgcatctggtatcaaagaaagagcggggacgtcacgacgttcattggaaacactgtgatcattgctgcatgtttggcctcgatgcttccgatggagaaaataatcaaaggagccttttgcggtgacgatagtctgctgtactttccaaagggttgtgagtttccggatgtgcaacactccgcgaatcttatgtggaattttgaagcaaaactgtttaaaaaacagtatggatacttttgcggaagatatgtaatacatcacgacagaggatgcattgtgtattacgatcccctaaagttgatctcgaaacttggtgctaaacacatcaaggattgggaacacttggaggagttcagaaggtctctttgtgatgttgctgtttcgttgaacaattgtgcgtattacacacagttggacgacgctgtatgggaggttcataagaccgcccctccaggttcgtttgtttataaaagtctggtgaagtatttgtctgataaagttctttttagaagtttgtttatagatggctctagttgttaa

SEQ ID NO: 213 - DNA, 4851 bp, Tomato mosaic virus
  source 1..4851: mol_type = other DNA
atggcatacacacaaacagccacatcgtccgctttgcttgagaccgtccgaggtaacaataccttggtcaacgatcttgcaaagcggcgtctatatgacacagcggtagatgaatttaatgctagggaccgcaggcctaaagtcaatttttccaaagtagtaagcgaagaacagacgcttattgcaaccaaagcctacccagaattccaaattacattctacaacacgcagaatgctgtgcattcccttgcaggcggtctccgatcattagaattggaatatctgatgatgcaaattccctacggatcattgacatatgatatcggaggtaattttgcatctcatctgttcaaagggcgagcatacgttcactgctgtatgccgaatctagatgtccgcgacataatgcggcacgagggccaaaaggacagtattgaactatacctttctaggctcgagaggggcaacaaacatgtcccaaacttccaaaaggaagctttcgacagatacgctgaaatgccaaacgaagtagtctgtcacgatactttccaaacgtgtaggcattctcaagaatgttacacgggaagagtgtatgctattgctttgcatagtatatacgatatacctgccgacgagttcggcgcggcactgctgagaaagaatgtacatgtatgttatgccgctttccacttttccgagaatttacttctcgaagattcacacgtcaacctcgatgagatcaatgcatgtttccaaagagatggagacaggttgactttttcctttgcatctgagagtactcttaattatagtcatagttattctaatattcttaagtatgtttgcaaaacttacttcccagcctctaatagagaggtttacatgaaggagtttttagtaactagagttaatacctggttttgtaaattttctagaatagatactttcttattgtacaaaggtgtagcgcataagggtgtagatagtgagcagttttacaaggctatggaagacgcatggcactacaaaaagactcttgcgatgtgcaacagtgaaagaatcttgttagaggattcttcatcagttaattactggtttccaaaaatgagggatatggtgatagttccactatttgacatatctctcgagactagtaaaagaacacgcaaagaggtcttagtttcaaaggactttgtttatacagtgttaaatcacattcgtacgtaccaggccaaagcgcttacttactccaacgtgttatctttcgtcgaatcaattcgttcgagagtgatcattaacggggttactgccaggtctgagtgggatgtcgataaatcattattacagtccttgtcgatgacgttcttcctacataccaagcttgccgttctgaaagacgatcttttgattagcaagtttgcacttggaccaaaaactgtctcacaacatgtgtgggatgagatttccctagctttcggcaatgctttcccatcgatcaaggaaagattgataaaccggaaactgatcaaaattacggagaatgcgttagagatcagggtgcccgatctttatgtcactttccatgataggttagtttctgagtacaaaatgtcagtggacatgccggtgctagacattaggaaaaagatggaagaaactgaggaaatgtacaatgcactgtccgaactgtctgtacttaaaaattcagacaagttcgatgttgatgttttttcccagatgtgccaatctttagaagttgatccaatgactgcagcaaaggtaatagtagcagttatgagcaacgagagtggtcttactctcacgtttgaacagcccaccgaagctaatgttgcgctagcattgcaagattctgaaaaggcttctgatggggcgttggtagttacctcaagagatgttgaggaaccgtccataaagggttcgatggcccgtggtgagttacaattggccggattatctggcgacgttcctgaatcttcatacactaggagcgaggagattgagtctctcgagcagtttcatatggcaacagctagttcgttaattcataagcagatgtgttcgatcgtgtacacgggccctcttaaagttcaacaaatgaaaaactttatagacagcctggtagcctcgctctctgctgcggtgtcgaatctagtgaagatcctaaaagatacagccgcgattgaccttgaaactcgtcaaaagttcggagttctggatgttgcttcgaaaaggtggctagttaaaccatccgcaaagaaccatgcatggggggttgttgagactcatgcgaggaaatatcacgtcgcattactggagcacgatgaatttggcattattacgtgcgataactggcgacgggtggctgtgagttctgagtcggtagtatattctgatatggctaaactcaggactctgagaagattgctcaaagatggagaaccacacgttagttcagcaaaggtggttttggtggatggcgttccagggtgcgggaagacaaaggaaattctttcgagagttaatttcgaagaagatctaattcttgtccctggtcgtcaagctgccgagatgatcagaagaagagctaatgcgtcgggcataatagtggctacaaaggataatgtgcgcaccgtcgattcatttttgatgaattacgggaaaggggcacgctgtcagttcaaaagattgttcatagacgaaggtttgatgctgcatactggttgtgtgaatttcttggttgaaatgtctctgtgcgatattgcatatgtttatggagacacccaacaaattccgtacatcaacagagtaactggtttcccgtaccctgcgcactttgcaaaattggaggtcgacgaagtcgaaacaagaagaactactcttcgctgtccggctgatgtcacacacttcctaaatcaaaggtatgaaggacacgtaatgtgcacgtcttctgaaaagaaatcagtttcccaggaaatggttagtggggctgcgtctatcaatcctgtgtccaagccgcttaaagggaaaattttgactttcacacagtctgacaaggaggcccttctctcaaggggctacgcagatgtccatactgtacatgaggtacaaggtgagacttatgcagacgtatcgttagttcgactaacacctacgcctgtatctatcatcgcaagagacagtccgcatgttctggtctcgttgtcaagacacacaaaatccctaaagtactacaccgttgtgatggatcctttagttagtatcattagagatttagaacgggttagtagttacttattagacatgtacaaagtagatgcaggtactcaatagcaattacaggtcgactctgtgtttaaaaatttcaatctttttgtagcagctccaaagactggagatatatctgatatgcaattttactatgataagtgtcttcctgggaacagcacgttgttgaacaactacgacgctgttaccatgaaattgactgacatttctctgaatgtcaaagattgcatattagatatgtctaagtctgtagctgctccgaaagatgtcaaaccaactttaataccgatggtacgaacggcggcagaaatgcctcgccagactggactgttggaaaatctagttgcgatgattaaaagaaattttaattcaccagagttgtccggagtagttgatattgaaaatactgcatctttagtggtagataagttttttgatagttatttacttaaggaaaaaagaaaaccaaacaaaaatttttcactgtttagtagagagtctctcaataggtggatagcaaagcaagaacaagtcacaattggtcagttggccgattttgattttgtggatcttccagccgttgatcagtacaggcatatgattaaagcgcaaccgaagcagaaactggatctgtcaattcagacagaatatccagcgttgcaaacgattgtgtatcattcaaagaaaatcaacgcaatatttggtcctcttttcagtgagcttacaaggcaattacttgacagtattgactcaagcagattcttgttctttacgagaaagacaccggctcagatcgaagatttcttcggagatctagacagtcatgtcccaatggacgtacttgagttggatgtttcgaagtatgataagtctcaaaacgagtttcattgtgctgttgagtacgaaatctggaggagactgggtctggaggatttcttggcagaagtgtggaaacaagggcatagaaaaaccaccctgaaagattacactgctggtataaaaacgtgtttatggtaccagagaaagagtggtgatgttacaacttttatcggtaataccgtcatcattgcttcgtgtcttgcatcaatgctcccgatggaaaaattgataaaaggagccttctgcggagatgacagtttgttgtactttcctaagggttgtgagtatcccgatatacaacaagctgccaatctaatgtggaattttgaggccaaactgttcaagaagcaatatgggtacttctgcgggaggtacgtgattcatcacgatagaggttgcatagtatactacgaccctttgaagctgatttcgaaacttggtgctaaacacatcaaggattgggatcatttggaggagttcagaagatccctctgtgatgttgctgagtcgttgaacaattgcgcgtattacacacaattggacgacgctgttggggaggttcataaaaccgccccacctggttcgtttgtttataagagtttagttaagtatttgtcagataaagttttgtttagaagtttatttcttgatggctctagttgttaa

SEQ ID NO: 214 - DNA, 4806 bp, Turnip vein-clearing virus
  source 1..4806: mol_type = other DNA
atggcacaatttcaacaaacaattgacatgcaaactctccaagccgctgcgggacgcaacagcttggtgaatgatttggcatctcgtcgcgtttacgataatgcagtcgaggagctgaatgctcgttccagacgtcccaaggttcatttctccaaggcagtgtctacggaacagacactgattgcaacaaacgcatatccggagttcgagatttcctttactcatacgcaatccgctgtgcactccttggccggaggccttcggtcacttgagttggagtatctcatgatgcaagttccgttcggttctctgacgtacgacatcggcggtaacttttccgcgcaccttttcaaagggcgcgattacgttcactgctgcatgcctaatctggatgtacgtgacattgctcgccatgaaggacacaaggaagctatttacagttatgtgaatcgtttgaaaaggcagcagcgtcctgtgcctgaataccagagggcagctttcaacaactacgctgagaacccgcacttcgtccattgcgacaaacctttccaacagtgtgaattgacgacagcgtatggcactgacacctacgctgtagctctccatagcatttatgatatccctgttgaggagttcggttctgcgctactcaggaagaatgtgaaaacttgtttcgcggcctttcatttccatgagaatatgcttctagattgtgatacagtcacactcgatgagattggagctacttttcagaagtccggtgataatttaagttttttctttcataatgagagcactctcaattacacccacagttttagtaatataattaagtatgtgtgtaaaacgttctttcctgctagtcaacggtttgtgtatcataaggagtttttagttactagagtcaacacttggtactgtaagtttacgagagtggatacttttactcttttccgtggtgtgtaccataataatgtggattgcgaagagttttacaaggctatggacgatgcgtggcactacaaaaagacgttagcaatgcttaatgccgagaggaccatcttcaaggataacgctgcgttaaacttttggttcccgaaagtgagagacatggttatcgtccctctctttgacgcttctatcacaactggtaggatgtctaggagagagattatggtgaacaaggatttcgtttatacggtcctaaatcacataaaaacgtatcaagctaaggctttaacttacgcaaatgttctgtcctttgtggagtctattaggtctagagtgataattaacggtgtcactgccaggtctgaatgggacacagacaaggcaattctaggtccattagcaatgacatttttccttataacaaagttgggtcatgtgcaggatgaaataatcctgaaaaagttccagaagttcgacagaaccaccaatgagctgatttggacaagtctctgcgatgccctgatgggggttattccctcggtcaaggagacgcttgtgcgcggtggttttgtgaaagtagcagaacaagccttagagataaaggttcccgagctatactgtacctttgccgacagattggtactacagtacaagaaggcggaggagttccaatcgtgtgatctttccaaacctctagaagagtcagagaagtactacaacgcattatccgagctatcagtgcttgagaatctcgactcttttgacttagaggcgtttaagactttatgtcagcagaagaatgtggacccggatatggcagcaaaggtggtcgtagcaatcatgaagtcagaattgacgttgcctttcaagaaacctacagaagaggaaatctcggagtcgctaaaaccaggagaggggtcgtgtgcagagcataaggaagtgttgagcttacaaaatgatgctccgttcccgtgtgtgaaaaatctagttgaaggttccgtgccggcgtatggaatgtgtcctaagggtggtggtttcgacaaattggatgtggacattgctgatttccatctcaagagtgtagatgcagttaaaaagggaactatgatgtctgcggtgtacacagggtctatcaaagttcaacaaatgaagaactacatagattacttaagtgcgtcgctggcagctacagtctcaaacctctgcaaggtgcttagagatgttcacggcgttgacccagagtcacaggagaaatctggagtgtgggatgttaggagaggacgttggttacttaaacctaatgcgaaaagtcacgcgtggggtgtggcagaagacgccaaccacaagttggttattgtgttactcaactgggatgacggaaagccggtttgtgatgagacatggttcagggtggcggtgtcaagcgattccttgatatattcggatatgggaaaacttaagacgctcacgtcttgcagtccaaatggtgagccaccggagcctaacgccaaagtaattttggtcgatggtgttcccggttgtggaaaaacgaaggagattatcgaaaaggtaaacttctctgaagacttgattttagtccctgggaaggaagcttctaagatgatcatccggagggccaaccaagctggtgtgataagagcggataaggacaatgttagaacggtggattccttcttgatgcatccttctagaagggtgtttaagaggttgtttatcgatgaaggactaatgctgcatacaggttgtgtaaatttcctactgctgctatctcaatgtgacgtcgcatatgtgtatggggacacaaagcaaattccgttcatttgcagagtcgcgaactttccgtatccagcgcattttgcaaaactcgtcgctgatgagaaggaggttagaagagttacgctcaggtgcccggctgatgttacgtatttccttaacaagaagtatgacggggcggtgatgtgtaccagcgcggtagagagatccgtgaaggcagaagtggtgagaggaaagggtgcattgaacccaataaccttaccgttggagggtaaaattttgaccttcacacaagctgacaagttcgagttactggagaagggttacaaggatgtgaacactgtgcacgaggtgcaaggggagacgtacgagaagactgctattgtgcgcttgacatcaactccgttagagatcatatcgagtgcgtcacctcatgttttggtggcgctgacaagacacacaacgtgttgtaaatattacaccgttgtgttggacccgatggtgaatgtgatttcagaaatggagaagttgtccaatttccttcttgacatgtatagagttgaagcgggggtccaatagcaattacagatcgatgcagtattcagggacagcaacttgtttgttcagacgcccaagtcaggagattggcgagatatgcaattttactatgacgctcttcttcccggaaacagtactattctcaatgaatttgatgctgttacgatgaatttgagggatatttccttaaacgtcaaagattgcagaatcgacttctccaaatccgtgcaacttcctaaagaacaacctattttcctcaagcctaaaataagaactgcggcagaaatgccgagaactgcaggtttgctggaaaatttggttgcaatgatcaaaagaaacatgaatgcgccggatttgacagggacaattgacattgaggatactgcatctctggtggttgaaaagttttgggattcgtatgttgacaaggaatttagtggaacgaacgaaatgaccatgacaagggaaagtttttctagatggctttcgaaacaagagtcatctacagttggtcagttagcggactttaactttgtggatttgccggcagtagatgagtacaagcatatgatcaagagtcaaccaaagcaaaagttagacttgagtattcaagacgaatatcctgcattgcagacgatagtctaccattcgaaaaagatcaatgcgattttcggtccaatgttttcagaacttacgaggatgttactcgaaaggattgactcttcgaagtttctgttctacaccagaaagacacctgcacaaatagaggacttcttttctgacctagactcaacccaggcgatggaaattctggaactcgacatttcgaagtacgataagtcacaaaacgagttccattgtgctgtagagtacaagatctgggaaaagttaggaattgatgagtggctagctgaggtatggaaacaaggacacagaaaaacgaccttgaaagattatacggccggagtcaaaacatgtctttggtatcaaaggaaaagtggtgatgtgacaacctttattggtaataccatcatcattgcagcctgtttgagctcaatgatccccatggacaaagtgataaaggcagctttttgtggagacgatagcctgatttacattcctaaaggtttagacttgcctgatattcaggcgggcgcgaacctcatgtggaacttcgaggccaaactcttcaggaagaagtatggttacttctgtggtcgttatgttattcaccatgatagaggagccattgtgtattacgatccgcttaaactaatatctaagttaggttgtaaacatattagagatgttgttcacttagaagagttacgcgagtctttgtgtgatgtagctagtaacttaaataattgtgcgtatttttcacagttagatgaggccgttgccgaggttcataagaccgcggtaggcggttcgtttgctttttgtagtataattaagtatttgtcagataagagattgtttagagatttgttctttgtttga

SEQ ID NO: 215 - DNA, 4839 bp, Pepper mild mottle virus
  source 1..4839: mol_type = other DNA
atggcttacacacaacaagctaccaacgccgcattagcaagtactctccgagggaataaccccttggtgaacgatcttgctaatcggagactgtacgaatcagcggtcgaacaatgcaatgcacatgaccgcaggcccaaggttaattttttaaggtcgataagcgaagagcagacgcttatcgcaactaaggcctaccctgagttccaaatcacgttctacaacacgcagaacgctgtgcacagtctcgcaggtggacttcggtctttggaactagaatacttgatgatgcagatcccctacggttcaacgacatatgatatcgggggaaattttgctgctcacatgtttaaaggtcgtgactacgttcattgctgcatgcctaacatggacttacgtgacgtcatgcgtcacaatgctcaaaaggatagcattgaactgtacctttcaaagcttgcgcaaaagaaaaaggtaataccgccatatcaaaagccatgctttgataaatacacggacgatccgcaatcagtagtgtgctcgaaaccttttcagcactgcgaaggcgtttcgcactgcacggataaagtatacgctgtcgctttgcacagtttatacgacattccagcagatgaatttggggcagcacttctgaggagaaatgttcatgtctgctatgctgccttccacttttctgagaatcttcttttagaagattcgtatgtcagtcttgacgacataggcgctttcttctcgagagagggcgatatgttgaacttttcttttgtagcagagagtactttaaattatactcattcctatagtaatgtgcttaagtatgtgtgtaagacttacttccccgcttctagtagagaagtgtacatgaaggagtttttggtaactagggtaaatacttggttttgtaagttttcaaggttagatacctttgtactatatagaggtgtataccacagaggtgtagacaaggagcaattttacagtgcaatggaagatgcttggcattacaaaaagactttggcgatgatgaatagcgaaagaatcctcttagaggattcatcgtctgttaattattggtttccaaagatgaaagatatggtgatagtacctttgttcgacgtatctttacagaacgaggggaaaaggttagcaagaaaggaggtcatggtcagcaaggacttcgtttatactgtgcttaatcatattcgcacataccagtcgaaagcgcttacttacgccaatgtattatcgttcgttgagtcgataagatcaagagtgataatcaatggggtgactgcgcgctcagagtgggatgtggataaggctttgttgcagtccctgtcaatgacttttttcttgcagaccaaattggccatgctcaaggatgacctcgtggttcagaaattccaagtgcattccaaatcgctcactgaatatgtctgggatgagattactgctgcttttcacaattgttttcctacaatcaaggagaggttgattaacaagaaactcataactgtttcggaaaaggctcttgaaattaaagtacctgatttgtatgtaactttccacgatagattggttaaggagtacaagtcttcggtggaaatgccggtactggacgttaaaaagagcttggaagaagcagaagtgatgtacaatgctttgtcagaaatctcaattcttaaagacagtgacaagtttgatgttgatgttttttcccggatgtgtaatacattaggcgtagatccattggtggcagcaaaggtaatggtagctgtggtttcaaatgagagtggtttgaccttaacgtttgagaggcctaccgaagcaaatgtcgcacttgcattgcaaccgacaattacatcaaaggaggaaggttcgttgaagattgtgtcgtcagacgtaggtgagtcctcaatcaaggaagtggttcgaaaatcagagatttctatgcttggtctaacaggcaacacagtgtccgatgagttccaaagaagtacagaaatcgagtcgttgcagcagttccatatggtatccacagagacgattatccgtaaacagatgcatgcgatggtgtatactggtccgctaaaagttcaacaatgcaagaactatttagacagcctggtagcctcgctctctgctgcggtatcaaacctgaagaagataatcaaagacacagctgctatagatctcgagactaaggaaaaatttggagtctacgacgtgtgccttaagaaatggttggtgaaacctctatcaaaaggacatgcttggggtgtggtgatggactcagactataagtgctttgttgcgcttctcacatacgatggcgagaacattgtgtgcggagagacatggcgtagagtcgcagtgagctccgaatctttggtgtattcagatatggggaagataagagctatacgctctgtgcttaaagacggtgaaccccatataagcagtgcaaaggttacacttgttgatggtgttcctggttgcggaaagacaaaggagattctttcgagggtcaactttgacgaagatctagttctggtaccaggaaaacaggctgctgaaatgataagaagaagggcaaacagttctggtttaatcgtggcgaccaaggagaatgtaaggacggtagactctttcttaatgaattacggtcgaggtccgtgccaatacaaaaggctgtttctggatgaaggtctaatgttacaccctggttgtgttaattttctggttggcatgtctctatgctccgaggcttttgtttatggagacacccagcagattccttacatcaacagagttgcaacttttccctatcctaagcatttgagtcaactcgaggtcgatgctgttgaaactcgcagaacaacgttgcggtgtccagctgatatcaccttcttcttgaatcagaagtacgaagggcaagttatgtgcacatcaagtgttacacgctcggtgtcacacgaggtcatccaaggtgcagcggtaatgaatccagtgtctaaaccacttaaagggaaggtgattacattcactcagtcagacaagtcattgctgctctcgaggggttacgaagatgtgcataccgttcatgaggtgcaaggggaaacgtttgaagacgtctcactagtgaggctgacgccaacacccgtgggaataatttcaaagcagagtccgcacctgttggtctcattgtctaggcatacaaggtcgatcaaatattacacagttgtgctagatgcagtcgtttcagtgcttagagatctggagtgtgtgagtagttacctgttagatatgtacaaagttgatgtgtcgactcaatagcaattacagatagaatcggtgtacaaaggtgttaaccttttcgtcgcagcaccaaaaacaggagatgtttctgacatgcaatattattacgacaagtgtttgccgggaaacagtactatactcaatgagtatgatgctgtaactatgcaaatacgagagaatagtttgaatgtcaaggattgtgtgttggatatgtcgaaatcggtgcctcttccgagagaatctgagacgacattgaaacctgtgatcaggactgctgctgaaaaacctcgaaaacctggattgttggaaaatttggtcgcgatgatcaaaagaaatttcaactctcccgaattagtaggggttgttgacatcgaagacaccgcttctctagtagtagataagttttttgatgcatacttaattaaagaaaagaaaaaaccaaaaaatatacctctgctttcaagggcgagtttggaaagatggatcgaaaagcaagagaagtcaacaattggccagttggctgattttgactttattgatttaccagccgttgatcaatacaggcacatgatcaagcagcagccgaaacagcgtttggatcttagtattcaaactgaatacccggctttgcaaactattgtgtatcatagcaagaaaatcaatgcgctttttggtcctgtattttcagaattaacaagacagctgctagagacaattgacagttcaagattcatgttttatacaaggaaaacgcctacacagatcgaagaatttttctcagatctggactctaatgttcctatggacatattagagctagacatttccaagtatgacaaatcacagaacgaatttcattgtgcagtcgagtatgagatttggaaaaggttaggcttagacgatttcttggctgaagtttggaaacacgggcatcggaagacaacgttgaaagactacacagccggaataaaaacgtgtttgtggtaccagaggaaaagcggtgatgtcaccacattcattggaaacacgatcattattgctgcatgtctgtcctctatgctaccgatggagagattgattaaaggtgccttttgtggtgatgatagtatattatactttccaaagggcactgatttccccgatattcaacagggcgcaaaccttctctggaattttgaagccaagttgtttaggaagagatatggttacttttgcggtaggtacataattcaccatgacagaggctgtattgtatattatgaccctctaaaattgatctcgaaactcggtgcaaaacacatcaagaatagagaacatttagaggaatttaggacctctctttgtgatgttgctgggtcgttgaacaattgtgcgtactatacacatttgaacgacgctgtcggtgaggttattaagaccgcacctcttggttcgtttgtttatagagcattagttaagtacttgtgtgataaaaggttatttcaaacattgtttttggagtaa

SEQ ID NO: 216 - DNA, 2391 bp, Turnip crinkle virus
  source 1..2391: mol_type = other DNA
atgcctcttctacacacactcaacacagcgctcgcagtgggactcctaggagccaggtactaccctgaggttcaaaccttcttggggctgcctgactacgtgggtcacatgaagaatgtagtacggtctgttttccagggatctgggctagtagtagtgtcctccgacacagtcggtgtcagggggacgtatagtaatagaggtcagataggtagtagtctcgggtgtatactagccgttccggatagcggggcggatatagaaatagacttagataggttggtaggaacggaagaggaagccacatcctgtttggtggaggcggtaggtagtaccgcagatgtccccaggaggagagttcgtcaaaaggggcggtttgccatgcatgccgtcaacgcagcaaagctgcacttttgtggcgtcccaaaacccactgaagcgaatcgactagcggtctcaaaatggcttgtccaatactgcaaagagagacatgtcgtagacagccacatcagaacgatagtcaatacggctcttcctagagtgttcacgcctgacgcggaagacattcaggtcgtgctggatttgcacagtgtaagagcacacgaccaccgcaacgccctagccgaagcaggcaaagtgcggaagtggtgggtcaatctcgcgatgcatcccatgactgggaggtcgtggtccagggcttggaggcgattatgccgactgcctgacgaccaggcgatctcttttgtccgctaggggtgcttgcgggagctggtcgggagggagactcaaatctccaggggtgaaaacccggccatgcgcgtgttcccgttagcaaatcccccgaaggttcgacgcatcttccatatctgtggaatgggcaatggtttagactttggagtccacaacaactcactcaacaatttgagaagagggttgatggaaagagtcttttacgttgaagatgcgcagaagcaattgaaaccagccccccaaccgatcccagggattttcgggaagttgagtgggattcggagacgattggtcaggttggccggaaatcatacccctgtgcctcgggagaaatacccgtcgttctacaagggcaggagggccaccatataccaaaaggctttggattctctacatgacagaccggtatcccggaaggacgcagaactcaaaacattcgtgaaggcagaaaagatcaatttcacggctaagaaagacccggctccacgggtcatccagccgagggacccacgatataatattgaggttgggaaatacttgaaaccgtacgagcaccatttatatcgggcaattgacgctatgtggggtgggcccactgtgctgaaaggatacgatgtgggggagcttggaaacattatgagtaacacctgggataaattccggaaaacgtgtgcgataggatttgacatgaagagattcgaccagcacgtatccgtggacgccctacgatgggaacacagtgtatacaacgcgggctttaactgtcccgagttggcacagctgctaacttggcagttgaccaacaagggggttgggagagcctccgatggctttatcaaataccaagttgatggttgtcgcatgtccggagatgttaacacagccttgggcaactgcctactggcttgctctatcaccaagtacttaatgaagggaatcaaatgcaaattaatcaacaatggagacgattgtgtgctgttcttcgaagctgatgaagtcgacagggtgcgcgaaaggctgcatcattggatcgactttgggtttcaatgcatagcggaagaaccacaatacgaattggagaaagttgaattttgccagatgtcccctattttcgatggtgaagggtgggtcatggtcagaaacccccgtgtgagcctctccaaggacagctacagcaccacacaatgggcgaatgagaaagatgcagccagatggttggctgccatcggagagtgtggcttggctattgcaggtggcgtaccagtgttacaatcatattattcttgcctgaagaggaattttggacccctggccggggactacaagaagaagatgcaagatgtttcctttgatagtggattctacaggttatccaagaacgggatgaggggcagcaaagacgtgtcccaagatgctaggttcagcttttaccgggggttcggctacactccagacgagcaggaagcgcttgaggagtactacgacaacctcgaactgctctgtgagtgggaccccacgggatataaagaagaacttagtgatagatggatcctgaacgaattccctacaactctctaagcgacagcgacgcaacaggaaaacggaagaaaggcggagagaaaagtgcgaagaagagattgg

SEQ ID NO: 217 - DNA, 816 bp, Turnip crinkle virus
  source 1..816: mol_type = other DNA
atgcctcttctacacacactcaacacagcgctcgcagtgggactcctaggagccaggtactaccctgaggttcaaaccttcttggggctgcctgactacgtgggtcacatgaagaatgtagtacggtctgttttccagggatctgggctagtagtagtgtcctccgacacagtcggtgtcagggggacgtatagtaatagaggtcagataggtagtagtctcgggtgtatactagccgttccggatagcggggcggatatagaaatagacttagataggttggtaggaacggaagaggaagccacatcctgtttggtggaggcggtaggtagtaccgcagatgtccccaggaggagagttcgtcaaaaggggcggtttgccatgcatgccgtcaacgcagcaaagctgcacttttgtggcgtcccaaaacccactgaagcgaatcgactagcggtctcaaaatggcttgtccaatactgcaaagagagacatgtcgtagacagccacatcagaacgatagtcaatacggctcttcctagagtgttcacgcctgacgcggaagacattcaggtcgtgctggatttgcacagtgtaagagcacacgaccaccgcaacgccctagccgaagcaggcaaagtgcggaagtggtgggtcaatctcgcgatgcatcccatgactgggaggtcgtggtccagggcttggaggcgattatgccgactgcctgacgaccaggcgatctcttttgtccgctaggggtgcttgcgggagctggtcgggagggagactcaaatctccaggggtgaaaacccggccatg

SEQ ID NO: 218 - DNA, 2457 bp, Tomato bushy stunt virus
  source 1..2457: mol_type = other DNA
atggagaccatcaagagaatgatttggcctaagaaagagatttttgtgggtgatttcgcaaccggagtgaataggacagttccggtgaacatctttcaattggtgtgtcgtgtggttctgagatacatgaggacagggaaaatagagtgtgattctgacagcatgactaagtttatagttgaattactcaaaactgattgtgctgccaaatgggaatggttcatgaagagacggcagaggggtgattacattgtccctctatctatagcctccataccaatcataccgctgttgagttatgccactagggtacgcgcagtctcagtcaaggcttttggcaatgaactatcgttcaatgtcagggtgcctagaccatctgtacctaagaaaggattgctcctcagactggcggcaggtctagcgttagctcctatatgcgcgctggccgtgtacgctaccctacctagggaaaaactgtcggtatttaagctgagaactgaggcacgagcacacatggaggatgagagagaagcgacagattgtctggtggttgagccggcaagggaacttaagggtaaagatggtgaggatctcctcactggtagtagattgactaaggtgatcgcgtccactgggcgccctcgtcgaagaccttatgcggcaaagatcgcacaggtggcgagagcaaaggtgggttaccttaagaacagtccagagaatagactaatctaccagagggtgatgatcgagatcatggacaaagactgcgtcaggtatgttgacagggatgtcatattgcctttggctattggatgctgttttgtctatccggatggagtggaggagtcggcggcactatggggctcacaggagtccctgggtgtcaaatagggaggcctagtacgtctacctggggttgtaacacagatcaatcgagatatcccatctgatgtgttacttcctcaggaggtgctagaggttcgtacaggacctcccaatgctaaggaccgtaatatatttatggttgcaggttgcccatcacaggcacggttcttagtacataatcactgcctgaaaaaccttaaaaggggtcttgtggagagagtcttctgcgtagagagaaacgggaagctcgctcgcactccacaacctaccaaaggagcctttggacgtctttccccgttcaggaaagcggtttgtgagaaggttggggtagcccaccgacttgggtatgatgggtttctgtcatactacagcggtgcgaaactccgtacttacacacgagccgtggagagtctgcatatcacacctgtctccgagagggatagtcacttgactaccttcgtaaaagcagagaagatatcgacgtctaagggtgacccagcacctcgggtgattcagcctcgaaacccgaggtacaatgtggaacttggaagatatctacggcatatggaatccaagctgatgaaagctgttgatggcgtgttcggagagacgacatgcatcaaaggatacacagctgatgaggtaggtgcaattttccgggctaaatgggacaggtttgataagcctgtcgccatagggctcgatgcatctaggtttgatcaacactgttccgttgaagcattgcaatatgagcatagcttctacagggccatgtaccctggcaacaagctcttgggcaagttgttggaatggcagctccataataaaggtaaaggttatgttccagatggaactataacctatcgcaaggagggctgtcgcatgagtggggatataaacacctcgttgggcaactatctactgatgtgtgcaatggtacatgggtacatgcgtcatctggggattaatgagtttagtctggcaaactgtggggatgattgcgtcctaattgtcgaacgcaggaatcttaagcagatacagagaactttaccggagtatttcctcaatctgggatatactatgaaggtggagcaacctgtatttcaactggaagaggttgaattttgccaggcacacccagtacagtttcaaggcggttggaagatggttcgaaacgtccgtactgctatgagcaaggatgtgcactgtgtcaacaatatacgcgatttggcgacgaggagagcttggagtaatgctcaacatcatgggggtctagcgcttagtgctggtattccagttgtggagacgttttactctaggtttaagctttatgatgtacctcgtaaacatcaacgtattgacacggtcacaaatgtgcacaagtggcgtggatccggtgggagttatgttgtgacccctgaatctagggctagcttttgggctgcctttggactcacgggggatgagcaactggctctggaggaccgtctggaaagatgggagatggatctgtttggagaggagggtgttgacgctcatgagcccagcatcctcgactccgccgtagcttga

SEQ ID NO: 219 - DNA, 891 bp, Tomato bushy stunt virus
  source 1..891: mol_type = other DNA
atggagaccatcaagagaatgatttggcctaagaaagagatttttgtgggtgatttcgcaaccggagtgaataggacagttccggtgaacatctttcaattggtgtgtcgtgtggttctgagatacatgaggacagggaaaatagagtgtgattctgacagcatgactaagtttatagttgaattactcaaaactgattgtgctgccaaatgggaatggttcatgaagagacggcagaggggtgattacattgtccctctatctatagcctccataccaatcataccgctgttgagttatgccactagggtacgcgcagtctcagtcaaggcttttggcaatgaactatcgttcaatgtcagggtgcctagaccatctgtacctaagaaaggattgctcctcagactggcggcaggtctagcgttagctcctatatgcgcgctggccgtgtacgctaccctacctagggaaaaactgtcggtatttaagctgagaactgaggcacgagcacacatggaggatgagagagaagcgacagattgtctggtggttgagccggcaagggaacttaagggtaaagatggtgaggatctcctcactggtagtagattgactaaggtgatcgcgtccactgggcgccctcgtcgaagaccttatgcggcaaagatcgcacaggtggcgagagcaaaggtgggttaccttaagaacagtccagagaatagactaatctaccagagggtgatgatcgagatcatggacaaagactgcgtcaggtatgttgacagggatgtcatattgcctttggctattggatgctgttttgtctatccggatggagtggaggagtcggcggcactatggggctcacaggagtccctgggtgtcaaatag

SEQ ID NO: 220 - DNA, 8640 bp, Tomato spotted wilt orthotospovirus
  source 1..8640: mol_type = other DNA
atgaacatccagaaaatacaaaaattaatagaaaatggaaccactttattgttatctattgaggattgtgtaggttctaaccatgatctggctttggatttacataagagaaatagtgatgagattccagaagatgtgattattaataataatgcaaaaaactatgagacgatgagagaattaattgtcaaaatcactgctgatggagaagggctaaacaaagggatggcaactgtggatgttaagaagctaggtgagatggtctctctgtttgagcaaaaatacttagaaacagagttagcaaggcatgatattttcggagagctgatctccagacacctaagaataaaacccaaacaaagaagcgaggtggagatagagcatgcactcagagaatatctggatgatctcaacaaaaagtcctgtgttaacaagctttctgatgatgagtttgagagaataaacaaagaatatgtggcaactaacgccacccctgataactatgtaatatataaagaatcaaaaaacagtgaactctgtttaatcatttatgattggaaaatatctgttgatgccaggactgaaaccaaaacaatggaaaaatactacaaaaatatctggaaatctttcaaagatataaaagtgaatggaaagccattcctagaagatcaccctgttttcgtttctattgttatattgaaacctattgctggaatgccaatcactgttactagcagtagggtattgggaaaatttgaagactctccatcagcattgcatggagaaagagtaaagcatgctagaaatgccaaactgctaaatatttcttatgttggaaaaatcgtaggaaccacgcccacagtggtgagaaactattatgcaaacactcagaaaatcaaatctgaagtcagaggaatcttaggtgatgattttggatccaaagatgtgttttttagtcactggactagcaaatacaaagagagaaatcctactgaaatagcctattctgaagatattgaaagaataattaactcacttgttacagaagaaatccctaaggaagagataatacattttttgtttggaaatttctgtttccacattgaaacgatgaatgaccagcatattgctgacaaatttaaagggtaccaaaactcttgtattaatttaaaaatagagccaaaagctgatttagctgatttgaaagaccacttgatccaaaaacagcaaatatgggaatctttgtatgggaaacaccttgagaagatcatgcttagaattagagaaaaaaagaaaaaagagaaagaaatacctgacataactacagcttttaaccagaatgccacagaatatgaagaaaagtatcctaactgttttacaaacgatctttctgaaactaaaactaacttttccatgacttggtccccaagttttgaaaaaattgaattgggctcagaagtagattacaataacgcaatcataaacaaatttcgggaaagcttcaaaagttcttcaagaattatttacaatagcccatatagtagcataaataaccaaacaaacaaagcaagagatataacaaacttggttagactgtgtttaacagagttaagttgtgatacaacaaaaatggaaaaacaggaacttgaggatgaaatagatataaacactgggagcattaaagttgagagaacaaaaaaatctaaagaatggagtaagcagggttcatgtttgaccaggaacaaaaatgaattttgcatgaaagagacaggcaaggagaacaaaactacctattttaaaggtttagcagtaatgaatataggaatgagctctaagaaaagaattctaaaaaaagaagaaataaaagaaaggatttctaaaggcctggaatatgatacctcagaaaggcaggctgacccaaatgatgattattcaagtatagacatgtcttctctgactcataggaaaaaactaattaggcacgacaatgaggacagcttaagctggtgtgaaagaattaaagattctttgtttattcttcataatggtgatataagagaggaaggcaagatcacatctgtttacaataattatgctaaaaatcccgaatgcttgtacattcaagattcagtattgaaagctgaactggagacttgtaaaaaaataaacaaattatgcaatgacctagccatttaccattactctgaagacatgatgcaattctccaaaggtttgatggtggcagacaggtatatgactaaagaaagtttcaagatactaactacagcaaatactagcatgttgctactggcatttaaaggagatggaatgaacaccggaggatcgggagttccttacatagcattgcacatagtggatgaagacatgtcagatcaatttaacatatgttatactaaagaaatttatagctatttccgaagtggtagtaattacatttatataatgagaccgcagagactcaaccaggtgaggctgctgagccttttcaaaacgcctagcaaagttcctgtatgttttgcacaattttcaaagaaagctaacgaaatggaaaaatggctgaaaaacaaagatatagaaaaagtgaatgtcttttctatgacaatgactgtaaaacagatattaataaatattgtattctcgtctgtcatgataggtactgtgacaaagctcagcaggatgggaatttttgatttcatgcggtatgctgggtttttgccactgtctgattattctaatataaaagaatacattagagataaatttgaccctgatataactaacgtggcagatatatattttgttaatggaatcaaaaaactattgttcagaatggaagatctcaatttaagcacaaatgccaagcctgttgtcgtagaccacgaaaacgatattataggaggtataacaaacttgaatataaaatgtccaataacaggatcgactttactaacactagaggatttgtacaataatgtttatttggctatttatatgatgcctaaatcattgcacaatcatgttcacaatctaacaagtttgttaaatgtccctgctgagtgggagctaaagttcagaaaagaattaggtttcaacatatttgaagacatataccctaagaaagcaatgtttgacgacaaagacctattctctataaatggagctctgaacgtgaaagcattatccgattactatctagggaatatagacaatgttggtttgatgagatcagaaatagaaaataaagaagatttcctgagcccgtgttacaagatatctactttaaaatcttcaaaaaagtgctcacaatcaaacattataagcactgatgagataatagagtgtctccagaacgcaaagattcaagatatagaaaactggaaagggaataatttggctattataaaagggcttataagaacttacaatgaggaaagaaatcgattagtggaattctttgaagataattgtgtcaattcgttgtatcttgtagaaaagcttaaagagataattaatagtggattgataactgcagggaaatctgtaacatccaaattcataagaaataaccatccattaacagtagaaacatatctcaaaacaaaactatattatagaaataatgtaacagttttaaagtctaaaaaagtgtcagaggagctttatgaccttgtaaaacagtttcataacatgatggaaatagatctagattctgttatgaaccttggtaaaggcacagaagggaagaaacacacattcttgcagatgcttgaatttgtcatgtccaaggctaaaaatgtcacagggtctgtagattttttagtttctgtttttgaaaaaatgcagagaactaaaacagacagagaaatatacttgatgagcatgaaagtgaaaatgatgctttactttatagagcacacattcaaacatgtagcacagagtgatccatcagaagctatctctataagtggagacaacaaaataagggcactttctacattatctttggacacaatcacatcttacaatgatattttgaacaaaaattcaaagaagtcaagattggctttcttatctgccgatcagtcgaaatggtcagcatcagaccttacctataaatatgttttagctatcatattaaatccaattttaactactggtgaagccagcttgatgatagaatgcattttaatgtatgttaaattgaaaaaggtttgtataccaacggatatttttttgaacctaagaaaagctcaaggaacttttgggcaaaatgaaactgccataggacttttgactaaaggtttgacgacaaacacatacccggttagcatgaactggttgcaaggcaatttaaattatctgtcgtctgtttatcattcttgtgcaatgaaagcttatcacaagactctagaatgttacaaagactgcgatttccaaactagatggattgtgcactctgatgacaatgcgacatcattgatagccagtggagaggtcgataaaatgctaacagatttttcaagctcatctctgccagaaatgttgtttagaagcattgaagctcatttcaaaagcttttgcataactttgaaccctaaaaagagttatgcttcttcatcagaagtagagtttatatctgaaagaattgtaaatggagcaattattcctctctattgcagacatttagcaaactgttgcacagaatcttcacatataagttattttgatgatttgatgtcactcagtatacatgttacaatgcttttgaggaaaggctgtcccaatgaagtaataccttttgcttatggggctgtgcaagtacaagcattaagcatctattcaatgcttcctggtgaagtgaatgatagcattaggatttttaaaaaacttggagtaagtttaaaatcaaacgagattcccacaaacatggggggctggttaacttctcctatagagccattgtctatattaggtccatcatcaaatgatcaaattatctattacaatgtgataagagattttttgaacaaaaaaagtttagaagaggtcaaagatagtgtctcttcttctagttatctacagatgagattcagagagttaaaagaaaagtatgaaagaggaactctggaagaaaaagacaaaaagatgatatttcttactaatttgtttgagaaagcatcagtgtccgaagattcagacgttctaacaatcgggatgaaatttcaaaccatgttaactcagatcataaaattgcctaatttcataaatgaaaatgctttaaataagatgtcaagttataaggatttctcaaaactttaccctaatctaaaaaagaatgaagatctatataagagtactaagaacttgaagatagacgaggatgctgttttagaggaagatgagttatatgagaagattgcgtctagcttagaaatggagtctgtccatgacataatgataaaaaatcctgaaacaattctgatagcaccattgaatgatagggattttttacttagtcagctgtttatgtacacaagcccttccaaaaggaatcaattatcgaaccaatctacagagaaacttgctttagatagggtattaaggtcaaaagctagaacatttgtggacatttcttccactgtgaagatgacttatgaagaaaacatggaaaagaaaatcttagaaatgctaaaatttgatttagattcatattgttcatttaaaacatgtgtaaatctagtaatcaaagatgttaatttcagcatgctgattccaatattggattctgcatacccttgtgaatctagaaaaagagataattacaatttcaggtggtttcagactgagaaatggatacctgttgttgaaggctctccgggactagtagtgatgcatgctgtttatggatcaaattatatagaaaatttaggtttaaaaaacatccctctaacagatgatagcattaatgttttaacaagcacatttggaacaggtctaatcatagaagatgtgaaatctctagttaaaggtaaagacagctttgaaacagaggcttttagtaattctaatgaatgtcaaagattggtgaaagcatgcaactatatgatagcagcacaaaacaggcttttagcaattaacacatgcttcactaggaaaagcttccctttctattccaagttcaatctagggagaggatttatttcaaacacactagctctcctatccaccatctacagcaaagaagaatcctatcattttgtttctacagctagttataaactagacaaaaccatcagaactgtgataagcgctcagcaagatatgaacttggaaaaaatactggacactgctgtatacatatcagataaattgcagtcacttttcccaacaattactagagaagatatagctttgatattacaaaatgtgtgccttgacagcaagcctatatggcagagtctagaagacaaaatgaaaaggattaacaattcaacagctagtggcttcacagtatcaaatgtgatcctatcacataacagtgaattgaacacaatccagaaacaaattgtctggatgtggaacatgggtttgtgttctcatagaacattagattttgttatcagatatattcgaagaagtgatgtaagatatgtgaaaactgaagaacaagacgaatcacgaaattatgtctctggaacaatgtacaaaattgggatcatgacaagaagctgttatgttcaattgatagcttctgatcatgatgtagcagtttctttgagaacaccattcgagatattgaatgaaagagagtatctttttgatacatacagagagagtatagagaaattgctgcagaaatttatgtttgataaagtgaacataataaagtcaaaacaaccacagattgtcttcttagaaccaggagatgcctgcattagaatgactacagataacaaaatgattgtcaaggttaatgccacatcaagacaaataagactagagaatgtaaaattagttgtgaagataaaatatgaaaatgtgaactctgatgtatgggatattatagaaggccaaaagtctctagtcttgaggcttcctgaagtaggggaatgtttctctgatatgtacaaaactgcagactctgaaaccgaaacaatcaaaaccataaaaaacaggctcatgacctctttaactttcatagaagcctttggaaacttatcacagcagatcaaagagattgtatatgatgatatcagagaaacaatggatgaattcttaatgaacatccgggatacctgcttagaaggtttggaaaactgcaaaagtgtagaagaatatgataattatctcgatgaagatggttttaatgacacagtggaactattcgaaaacttgctaagaacacatgataactttgaagatgagtatagtcctctgttttcagagattgttgataaagcaaaacagtacactagagatttagaaggtttcaaagaaatactgctcatgcttaaatattccctgataaatgatgcatcgggatttaaaagctatagagccactggaatgcatgctgttgaactaatggcaaaaaaacacatagaaataggagaattcaacttgttaggaatgatccaactgattaaagcttgtgaaacatgccacaacaatgactctatattaaacttagcaagtttgaggaatgttcttagcaggacatatgccacattcgggaggagaataggattgaaccatgatctggacttgcaaaacaatttaatggaaaaaagttgtgatttcaagacgctggttttaccagacataaaattatcagaactatctagggagatactgaaagaaaatgggtttgttatatctggagagaatctaaaaatggataggtctgatgaagaatttgagggtcttgctagttttaatgtgttgaggctagatgaggaagaaatgtatgaaggtttgatcaaagaaatgaaaattaaaaggaaaaagaaagggtttttattcccggcaaatacacttctactaagtgagttgataaaattcttgattggagggataaagggaaccagttttgatatagagacattgttgcggaacagttttagaccagacatattttcgaccgacagattgggtaggttgagttctagtgtacctgcactcagagtttatgcaactgtttatatggaatataagaatgcaaattgtcccttaaatgagatagctgacagcttggaaggttatctaaaactgacaaaaagcaagcctaaggagcatttcttgcatggaagagtcaagaaagccttgatacaattaagagatgaacaatcacgaactaaaaaattagaggtttataaagatatcgcaaatttcctttccagacatccactatgtttgtcagagaaaaccttgtatggaagatacacctactctgatattaatgattatatcatgcaaacaagagagattattttgagtaaaataagtgagttggatgaggttgttgaaacagatgaggacaatttcttgcttagttatctaagaggagaagaagatgcctttgatgaagatgaaattgatgaagaagaagatacagattaa

SEQ ID NO: 221 - DNA, 8669 bp, Watermelon bud necrosis orthotospovirus
  source 1..8669: mol_type = other DNA
atgaacattcaaactataaacagttttctagatgcttcaggcgaaaccactgcatatctgcagagaataaaagatgaaatcatgttaatgtcaaatgttatagaacaaggttattctgaaggtaaaggtgtaattgaatctggattgagttctataatgtctatgaattatattctagacaagattgaagacatgaaatcaaaataccatcagagctcctcttctattgatcaaagagaaatggaaacagaaatctatttatttctcgataaatataaagaactagagttgatgaggcatgatctctttggtgttcttgctggaagaagattacattttgttccaaaacacagatctgatgtttttatgaaagattgtcttatgtcttatatagagttctgcagtgcttcagtgtccatttcgaacaaaatagacaaccttgatagtctaaaagaaaaattgatcttccagcacctaacaccagacaattacacaatatacaaagaaaccaaaggtgagaaagcatgtttgatgatatatgattggaaagtgtctgtagatgctgtgtctgaaggcaagacgtcagaaaactattacacaagtgtttggaaaacttttaaagatatcactatagacgaagaaccttttttagagagacacccaatattcataaccattgttgtgttgaatcctagcggtaatatgccaattgtggcaacaacttgccgggtcgtccaggagttcaggaactcaccatataaaaccttcaatgaccgcaaacgagctgctgaagcagcaaagctaatatcagttaattctctaggtcagcttataggtctgggtgctgactgttttaggcggttttactcagaaacacaatcgtttaagaactctctcttatctaaggttggcaagtatatgaacaggtcatcggaggttttctttagccactggtcatgtgaatacaggaaaactaatttatcaaacaatcaaattagtcaagatattattgatttgatcaattccttgcctaacgatgtggtggggaaggagatccttgttcattttctttttgggaattatttatacttcaaagagactatgagtgaacttcatctcaaagatagatttgaggggtacagatcacactgcaaaatgatgagaattcgtcctttggaaaatgaagaaaaacttaaagactatcttgatagaaatgagcatatttttgagagtttgtatgaaacacatctcaaaaagataaaatcagatgtgctactcagaaaatctaaagaaatagagatagaaagcatagagcgagctttcaacattaatgcagaggagtaccaaaaagagtatcctggatgtttcacaaatgatcttcaagaaactaaaacaaacttttcaatctgctggtcaccaatgacagaagaactaaagatgaatgatcttaattataataatgcaataatacaatctttcagagatgctttgagtgaacagccaaagcttattcaccataaatcatatggtggggctaaagtagacacttatttttccacaactctttttaatttagttagagcttgtctagtagatctaagtacagatacaacgggacattcaaaggctaccttagaagacgtagtggatattaaagatggcagcatccaggtaaaaagaactgaagcctcacagagatggagagaaatagggaatgtcaagactagaaatgggaatgagttcacgttatcaccgcaagcagacactgaagcaagaaagaattttttcagaggtttaaacttgatgtatgttgacatggggaagaaaaagaagatagatataaagaatgaattaaaaagcaagatccaggagtcaatggctcagcaaaagaatgaaaacatggatggcccgagcggggagtatgatgtgtcaaaagccaatatacctcaccaaacgagcctcaaagggatcacacataacaaaaagctaatcagacatgataacccagatgttaaatatcattgtgagtcaatgattgaatctatgtacgtccttcatggtatggacgaaagaaaagataaaaatagtaaaataaattctgtctacaatgaatattgctcaaatccttcttcactatttactaaaggcaatttgatagaaactgaaatgacaattgcaaagaatatccatgaagtagctaaggaactttcaatttacacatatagtgaagacatgatgcagatggcaaaaggtttgatggtggctgacaggtttatgaagaaaacagacttcaagatcttaacttgtgccaatacaagcatgatatgcctagcattcaaaggtgacggcataaacacagggaagtcaggtgtgccttacatcaccatacacaaggtagacaagagcatccaaccacactttgtttctttatacacaaaagaactaatagtgtcttttaaatcagagaattattttattaatatcatgaggccacaaaggctaaatcaggtgcgacttctcagcctgttcaaagctcctagtaaagtccctatcctcttttcacaatattccttattgagtacagagataaaaaaatggttgaatcagcaatccatagatgttttcacttgccctgaaaataagatccagtatctgcaaaagatattattctcctctgtgatcattggcactgtgaccaaactcagcagaatgggaatttttgatttcatgaggtatgcacggtttctaccactgtctgattattccaatataaaggaatatatagctgagaagtttgacccagatataacaaatgttattgattgtttttttgtttctggaattaagaatcttcttctgaaaatggaaggtataaatttaagtaatagtataaaacctctgactatagatcaagaaaatgatatgtctggaggtatatcagatttagacatcatatgccctatcacaggatctacactaaagactatagagtgtctgtataacaatgtctatcttgcaatttacatgatgccgaaatctctccacactcatgtacacaatctcacaacacttctgagtgtcccggctgaatgggaaattaagtttagagaaaaaatgggctttatgataggagatgaaattaaaccaaagaaagaaatgttcaatgattctggtccattctcaattaatggagtgctcaatgtgaaaactttgtttgattattacaagaaaaatattacaaatgttggtgcttgtagatcaaatatagaagaaaaagaggattttttgtctgctccatataaaataaaaactttaacatcatctaaaaaatgctcaaaggcagatatcataaaaagtacagagatagttgctgctttaaaatcatcatatggaaaacagccagatgatataaagggttcagacctttatatactgaagggagttctgaagtgttttgatgaagatagagattcattaaccaacttcttggaggtagaaggcttagaagagtcaaaatatttacatttttttaccaacatgatgtcaggtgataataaaatattgatgaaaactaaccaagacaaattttattataaaagtcatcctttgacagtggagacatttatgaaagttaggtatggttatttcaagacaaccactgttttaaaatcaaaaaaagtaagtgaggaattgtatgatttaatcaaagagttcaacaagataacagaggttgacctggaagctttggaaaagctaggtcgtggactaaaaggcaatcgagtcacatttatacaattattggaatttattttgatgaaatccagaaccaatgctgggaacacagatttcttggtatcaatatttgaaaagatgcagagaacaaagatggatagagagatttatcttatgagcatgaaaacaaaaatgatgttgtattttatagagcatacatacaagcatgtggctcaatctgatccttctgaagccatctcgatctctggagactacaaaattaaaaatttggcatctttatcatatgatactataactaattacaacacagctcttcagaaaaatcttgaatgcaaaatggcttttttatctgcagatcaatcaaaatggtctgcatcagatctaacctataaatacatcttggctgttattatgaatcctcttttaaccacaggagaaataaacctgatgtgtgagtgcataatgatgtatgtaaagttgaagagagtttgtattcctaccgacatctttctaaacctaaaaagagggcaaactgaatatggatcttatggaactgcactgtctgttttaacagataacttagaaacaaatacatttcctgtatccatgaactggctccaagggaatttgaattatctttcgtcagtgtaccactcttgtgcaatgatgggctatgaaaaagctatgaaaaagatgggaaactatgatttcactataagatggatggtgcattcagatgataatgctacttctatggtggttagaggggatataaaagaacttcttgccgagtttaattgcaccagtctgtcagaactgcttttccggagtatacaatcacattttaaaagttattgcataacattaaatccaaaaaagagctatgcctcagaatcagaggtagaatttatatctgaacgaataattaatggtgctgtcatacccttgtattgtagacacttagctaattgtagcacggaaagttcccataatagctattttggtgatctgatgtcactttctatacatataacaatgctcttaagaaaaggatgtcctaatgagctgataccatttgcttatgctgcaatacaaatccaatttctcagcatttactcaatgcttcctggggaagaaaatgatatatcaactattgtcaaagaaattgattttcccttatcaaaaagagaaatcccgatatgtgctggtggttggatgtatgcacctatagaattattgtctatcttaggtccttcatcaaacgatcaattgatttactacaaaatcatcctagatttttttaacctaaaagattttagtagtcttaagaaaagcgtcaactctttaggctacattgatttaagaatcaatgaattgttcaaaagaataaaatatcaaaaaataacaaatgcggataaaaaaatgatatgcatggttaacttatttaaaacaagtttgatgtctgaagactgtgacagtttaaatgtaggaatgaagttccaatccatgatcacacaaattataaaactacctagttttgttagtgaaggctcactgttgaagaactcaagtttccaagacttctgtaagctattccccaatttgaagaaaaacactgacatactcaacgcattaaaacctgttaacttggatgaaagaagccttgaagagttaaatgagagcaaatttttatcacaaatccagctagaagagttgagtaggcacatggcatctcatccagaatcgtttttgatagcaccaatgaatgacaaagattacattttgaccaatctctatacgtatagcagtgtaagcaaaaggaatcaaatgttaaatcaatcaactgagaaattggcattggatagaattttaaggtctaaagctaaaaccttcttagatcccaattcaaaagagatggtttcatataaagaaaatatgtctatgaaaatgagagagataatgagctatgctgggaatgacttcaaaattattaatactatatccagccttatggtgagagacatgaattttgaaatggtcgtctctttaatggagaacactgttgctaatgcttctattcctaaagcgaattataattttagatggttcataactgaaaaagtaccaagtgtcattgagggatcccccggtttaattgttatgtcagctgtttatggcatggattatttgatagagctaggactcaaaaaactccctttgacagaaacctctatctctatactgcatgacatctttggtaacagaaaaacatttgatgatgttaaagagtgtatacagaatgttaaaaagcaatacaagacagaagaatttcaaaatgcagatgttctaaagagatatgtattaagtataaattacatgatccagtcccaaaacaagcttctgtctatcaacacatgtttctccaggaagaatttccctttctattcaaaatataatctaggtaagacgttcataaccaatactttagctatatggagcactatatacagccgattgacaaatataaacttttacaccaatctgaattttgtaattgacaggagttctaggttgattatctcattgcaaagagacatgaatctagaaaaactaattgattgctgtgcctatgtttctgacagattgcaaagcttatttcccgatatgaccgtagagtctatccggcaagttttgtgcaggctaaattttaatggggtagatcttatgaagaaaatgaaatctgaaatagctgaggtaaaaagagccataaacaacataaagacatccactcatgtaactctctcattcaggccacaaatgatagcaatgagcaaacatgcagcatggttatacaattttggatatattaatgagaaagagttcaaatttgtcatagatcagatcagacaaagcgaagtccattatattaaaacagatgagcaagatgtcagaggttactatgtttcaggtcatacatacaaaatagggatcaaaacccagcataactatggacagcttgctatgtcaaaccaagatgtgtcaatccatctccactcaccgtatgaatacaagagagaagatgatgggaaaatatgggatgttcatgttagatctgtatataaattgcttcaaaagctcttaatggacaagcaaagtgtaattaaagcatttttaaatattagaacagaactaatgcccaatcaattttgtattcatgagagttcaaataaaactctattgatattgatcaatgatacaacccgaccaatctcattagagagaatcaaattcaaaggtgatataaaatacattccctcctctgactttgcctgggacatgatgagcaatcagtctaaatacagattgcgacaagcagaaacaggagaatgttacacagaattatacaaactaatagacaacaatgataatttgatgaacactattttaacaaatttaaagaaaagcttagaatatgggaatgaaatggagaaccttatagagcaatcaatccaagggatagatgatgcagatactattgaatatatccaagagtctgttgaccaaatccacaaattagccatagaaggtttagaaacatgtcagacatcagatgaatttgaaaactacctaaaaagagttgattttcaatctacagttgatttccataaagatcttttagagcagattgttgaggaaaaatatggttcagcagaaagactagatgttgctgtagagaagctaaccaaatggacaaacagtttatcaacatttaaagatgtgtgcacaatgttaaagttctccatggtcaatgattctaagggaattaaaacatataaagctaatggagctgatttccactcattatcagcaagtgaagtcatgacttcacaaggatttgatttgttcgaattactgaagttaataaaggcctgtgaagcttgccacaccagcaattcagtattgaacttaattgcttttaaaaatatcaaaaacaaaaccttcatcccagggtttaagagacacttgcccaatacagttcattttgactatgaaatgaaactaaataatgaagtgatgaacaaattctatgagtataaaacaatctcactacaagatataaaagtttctgatagagtaaagagggtccttgaaacaaatgggttcagtatcacaggccacaatttgaagttagaagaaacaaacttagaattgaaccccgtggagattatagatgactcttccacttatgatcaggttgccaagcaaatgaggttaacaaagaaaaagagctcatatcttatacctgctaacactctattgttaggagaactaatgaagttcttgatgctgtgcatcaaaggagaagaacatgatataatgaaacttttgagaagtcattttgcaatgcagcctgtaagagaaaatagattgctttgtatccaagatgctgttatgacatgcaggataagtggttatatccaaagacactttctcaatgacaagaaagaaatcgtactgttaggtgtagctgacagcttagagaacttcatttccttagcaactccaaactatgcaacacaggagccatttaaagcagaggctttgataaaaaaagccctggcagaagtgtatgattccggtaaatataagatactaaaaaatataagaaattatatagttgatgatgtagaatttcttacagaaaagtgtttatattcaaacataactaatgaggagataagcaacatgatatttaatgcagttagcaaaattgatctggaattatccaatttaaagccaaagaagagaaagaaaagactagacttacatgacgttttcaatggattcttgggatcagatgctactacttcggaacaacaataaaaaggaggtaatctatgggcgggaggaaagga

SEQ ID NO: 222 - DNA, 5535 bp, Turnip yellow mosaic virus
  source 1..5535: mol_type = other DNA
atggccttccaattagcattggacgcccttgcacccacgactcacagagatccctctctgcacccgattctcgaatccacagtggattcaattcgctcctcgatacagacctacccatggtccattccgaaggaacttctacccctactcaactcctacggcatcccaacatctggtttgggaacctcccaccacccccacgccgcccacaagacaatcgagacttttctcctttgcacccactggtctttccaggccaccactcccagctccgtcatgttcatgaaacccagcaagttcaacaaacttgcccaggtaaactcaaactttcgggagctgaagaactaccgcctgcaccccaacgacagcactcgttaccccttcacatcaccagaccttcccgttttccccaccattttcatgcacgacgccctgatgtattaccatccgtcccagatcatggacctgttcttncggaaaccaaacctcgaacgtctgtacgccagcctcgtagtgccacccgaggcccatctttccgaccaatccttctacccaaagttgtacacgtacacgacgacccgccacactcttcactacgtcccagagggtcacgaagccggcagctacaaccaaccgtccgacgcccactcttggctccgaatcaattccattcgcctcggcaaccaccacctctcagtgacgatcctggaatcctggggccccgtccactcgctcctcattcaacgagggacccccccccccgacccatcactccaggcccctccaacactcatgncctcagacctctttcggtcttaccaagancctcgcctcgacgtggtctccttccgaatccccgacgccatcgaacttccacaggccacattcctccaacaaccacttcgagaccgactggtcccccgagccgtctacaacgccctgttcacctataccagagcagtccgcacactccgaacttcagacccagcagcattcgtaaggatgcactcctccaaaccggaccacgattgggtcacctcgaacgcctgggacaacctgcaaaccttcgcacttctgaacgttcccctccgaccaaacgtcgtctaccacgttcttcagagcccaatcgcctccctaagcctttacctgaggcaacattggcgccgtcttaccgccaccgccgtccctatcctctccttcctaaccctcctgcagcgcttccttccattgcctatacctctagcagaggtaaaatccatcacagccttccgaagggagctttaccgaaagaaggagccccaccaccccctcgacgtcttccatctccagcaccgcgtccgcaactaccactccgcgatctcggccgtacgcccggcttccccaccccaccaaaaactcccacacgcactccagaaagccgcattactgcttctccgaccgatatcgcccctcttgacagcgaccccgttctttcggtccgaacagaagtccatgctcccgaacgccgaactttcatggaccctgaagcgcttcgctctgccctggcaagcctccctagtcctcctcgctctgtcggaatcatccatactgctccacaaactgttctccccgccaaccctccaagcccaacacgacacctaccaccgacatctccaccctggatcctacagtctccagtgggagaggacgccattgtcgattccgaggacgacagcatttcttcctttcactcccacgacttcgacagcccctccggaccgctccgaagccagtctccctcccgctttcgcctccaccttcgttccccgtccacctccagcggcatcgagccctggagcccagcctcctacgactacggcagcgcccccgacaccgattgaacccacccaacgcacccatcaaaattctgacctcgcgctcgaaagttcaacctcaaccgaacctcccccaccccccatccgatcccccgacangacgccctccgcccccgtccttttcccagaaatcaactcacctcgtcgttttcccccccaacttcccgccacgcccgatctcgaacccgcccacactccaccccctctttccatcccgcaccaagatccgactgactcagcggaccccctcatgggctcccaccttttgcaccattcactgcctgcaccccccacccacccccttccatcttcacagctgttacccgcacctttaacgaacgaccccactgcgatcggcccggtgctcccctttgaagaactccacccacgcaggtaccctgaaaacaccgccactttcctcacgaggctccgttcactcccatcaaaccatcttccacaacccaccttgaattgtcttctctccgctgtctccgaccaaaccaaggtttccgaggagcacctctgggagtccctacagacaattctcccagacagccaactcagcaatgaagagaccaacactctcgggctttcaactgaacacctcactgcgttggcccacctttacaacttccaggcaaccgtttactccgatcgcggccccatcctcttcggcccctccgacaccatcaagaggatagacatcacccacaccaccggaccgccatcccacttttcacccggcaaaagactcctaggcagccaaccctccgctaagggccatccctccgacccactcatcagagccatgaagtctttcaaagtatccggcaactaccttcccttctctgaggcccacaaccatcccacctccatctcacacgccaagaacttgatttcaaacatgaagaatggtttcgacggcgtcctctccctcctcgacgtctccacgggccaacgaaccggacccncccccaaagaacggatcatccagatagaccactaccttgacaccaaccccggcaaaaccactcctgtggtgcatttcgctggcttcgctggctgtgggaagacatatccgatccaacagctcctcaaaaccaaactgttcaaagacttccgggtctcttgccctaccacagaactcagaaccgaatggaagacagcgatggaactccacggctcccagtcatggcgctttaacacttgggagtcttccattctcaagtcatccagaatcctggtcattgatgagatctacaaaatgccaagagggtacctcgacctttccatcctcgccgaccccgccctcgagctcgtcataattctcggcgatcctctncagggcgagtaccactcccaatcgaaagactcatccaaccaccgccttccctctgaaactctcaggctgctaccatacatcgacatgtactgctggtggagttaccgcattcctcaatgcatcgcccgactcttccaaattcacagcttcaatgcctggcaaggagttatcgggtccgtttccactccccatgatcaatcccccgtcctcaccaacagtcatgcctcatctcttaccttcaacagcctgggatatcgctcctgcacgatcagctctagccaaggcctcacattctgcgaccccgccataatcgtcctggacaactacaccaagtggctctcctcggctaacggcctcgtcgccctcactcgatccagatcaggcgtccaattcatgngcccctcttcctacgtcgggggaaccaacggctcttccgccatgttttccgacgccttcaacaacagcctcatcatcatggatcgctacttcccatccctgttcccgcaactcaagctcatcacctcccccctcacaactcgcggccccaaactcaacggggccacccccagcgcatcccccacccaccgttcgccaaacttccaccttcccccacacattccgctctcctatgatcgtgattttgttacggtgaacccaactctccccgaccaaggacccgaaacaagactcgacacccactttctcccaccgtctcggctccctctccatttcgatctcccaccggctatcaccccacccccggtttccacaagcgtcgacccgccacaagcgaaagctagccccgtctacccaggcgagttcttcgattctctggcggcgttcttcttaccagcacacgacccatcaacaagggaaatactccacaaagatcaatctagcaaccagttcccctggttcgaccgacccttcagcctgtcctgccagccctcaagtctgatttccgccaagcatgcacccaaccatgatccgacccttctaccggcctccatcaacaaacgcttgcgattcagacccagtgactcaccgcaccaaatcaccgcggacgacgtggtcctaggcctgcaactctttcactctctttgtcgcgcctactcacgtcaacccaacagcaccgttccattcaaccctgaacttttcgcagaatgcatctctctgaatgagtacgcacagctcagttccaaaacccaatccaccatagtggccaacgcttcacgctccgacccagactggcgacacaccaccgtcaagatcttcgcgaaagcccaacacaaagtcaacgacggctccatcttcggctcgtggaaagcctgccagaccctcgcactcatgcacgactacgtgattctggttcttggacccgtcaagaaataccagagaatcttcgacaacgctgaccggccacctaacatctactcacactgcggcaagacacccaaccaacttcgagattggtgccaggaacatctcactcattccacccccaaaatcgcaaacgactacaccgctttcgaccagtcccagcatggagaatccgtggtccttgaagccctcaaaatgaagagactgaacattccnagccatctgattcagctccacgtccacctcaagaccaacgtctccacccagttcggccccctcacatgcatgcgcctaaccggggaacccggaacttacgacgacaacactgactataacctcgcagtcatctactcccagtatgacgtcggttcctgccccatcatggtttctggcgacgactcactcatagaccacccccttcccactcgccacgactggccatccgttctcaaacgcctccacctccgcttcaaacttgaactcacctctcaccccctcttctgtggctactacgtcggtccagccggctgcatccgcaaccccctggcccttttctgcaagctcatgatcgccgtggacgacgacgccctcgacgaccgacgactcagctacctcaccgagttcaccaccggacacctccttggcgaatcactgtggcacctcctccctgaaacccatgttcagtatcagtcagcctgctttgacttcttctgcaggcggtgcccaagacacgagaaaatgctcctcgacgactccacacccgcactcagcctcctcgaacgaatcacttcttcgccgaggtggctcaccaaaaatgccatgtacctcctccctgccaagctacgactggccatcacctctctatctcaaacgcagtccttcccagaatccatcgaggtttcccacgctgagtctgaattgcttcactacgtccaatag

SEQ ID NO: 223 - protein, 415 aa, Citrus tristeza virus
VVRSQAIPPRKASLQENLLSYESRNYNFIKTERFVGPSEFGRAMAAAVIERCFKMEEMAKIRCDIISLTEANILKWLDKRTPCQIKAVHGELKLPFSVEEQISNFKLMVKRDAKVKLDDSSLSKHPAAQNIMFHKKFINAIFSPCFDEFKNRVLSSLNDNIVFFTEMTNAGLAEIIRRIIGDDDNLFVGEVDFSKFDKSQDLFIKEYERTLYSEFGFDTELLDVWMEGEYRARATTLDGQLSFSVDGQRRSGGSNTWIGNSLVTLGILSLYYDVSKFDLLLVSGDDSLIYSSEKISNFSSEICLETGFETKFMSPSVPYFCSKFVVQTGNKTCFVPDPYKLLVKLGAPQNKLTDVELFELFTSFKDMTQDFGDQVVLEKLKLLVEAKYGFASGTTMPALCAIHCVRSNFLSFERL

SEQ ID NO: 224 - protein, 446 aa, Beet yellows virus
TQVFESGADNVVIRDSAPVNKSTDHDPQRVSSIRSQAIPKRKPSLQENLYSYESRNYNFTVCERFSGPQEFGQAMAMVMLERSFDLEKVAKVRSDVIAITEKGVRTWMSKREPSQLRALSSDLQKPLNLEEEITTFKLMVKRDAKVKLDSSCLVKHPPAQNIMFHRKAVNAIFSPCFDEFKNRVITCTNSNIVFFTEMTNSTLASIAKEMLGSEHVYNVGEIDFSKFDKSQDAFIKSFERTLYSAFGFDEDLLDVWMQGEYTSNATTLDGQLSFSVDNQRKSGASNTWIGNSIETLGILSMFYYTNRFKALFVSGDDSLIFSESPIRNSADAMCTELGFETKFLTPSVPYFCSKFFVMTGHDVFFVPDPYKLLVKLGASKDEVDDEFLFEVFTSFRDLTKDLVDERVIELLTHLVHSKYGYESGDTYAALCAIHCIRSNFSSFKKL

SEQ ID NO: 225 - protein, 295 aa, Potato virus X
GTVRQSPDFDENKIMVFLKSQWVTKVEKLGLPKIKPGQTIAAFYQQTVMLFGTMARYMRWFRQAFQPKEVFINCETTPEDMSVWALNNWNFSRPSLANDYTAFDQSQDGAMLQFEVLKAKHHCIPEEIIQAYIDIKTNAQIFLGTLSIMRLTGEGPTFDANTECNIAYTHTKFDIPAGTAQVYAGDDSALDCVPEVKHSFHRLEDKLLLKSKPVITQQKKGSWPEFCGWLITPKGVMKDPIKLHVSLKLAEAKGELKKCQDSYEIDLSYAYDHKDSLHDLFDEKQCQAHTLTCRT

SEQ ID NO: 226 - protein, 70 aa, Potato virus A
GQLGVWNGSLKAELRPKEKVDLNKTRTFTAAPIETLLGGKVCVDDFNNMFYSLHLKAPWSVGMTKFYGTW

SEQ ID NO: 227 - protein, 236 aa, Potato virus Y
GLLGIWNGSLKAELRCKEKILANKTRTFTAAPLDTLLGGKVCVDDFNNQFYSKNIECCWTVGMTKFYGGWDKLLRRLPENWVYCDADGSQFDSSLTPYLINAVLTIRSTYMEDWDVGLQMLRNLYTEIVYTPISTPDGTIVKKFRGNNSGQPSTVVDNSLMVVLAMHYALIKECVEFEEIDSTCVFFVNGDDLLIAVNPEKESILDRMSQHFSDLGLNYDFSSRTRRKEELWFMSH

SEQ ID NO: 228 - protein, 236 aa, Pepper mottle virus
GKLGVWEWALKAELRSKEKIEANKTRTFTAAPIDTLLGGKVCVDDLNNQFYSKNIECCWTVGMTKFYGGWDKLLTALPAGWIYCDADGSQFDSSLTPYLINAVLTIRYAFMEDWDIGYKMLQNLYTEIIYTPISTPDGTIVKKFRGNNSGQPSTVVDNSLMVVLAMHYAFVREGIAFEEIDSICKFFVNGDDLLIAVNPERESLLDTLSNHFSDLGLNYDFSSRTRNKSELWFMSH

SEQ ID NO: 229 - protein, 235 aa, Bean yellow mosaic virus
GRMGVWNGSLKAELRPQEKVLANKTRSFTAAPIDTLLAGKVCVDDFNNKFYSLHLKIPSTVGITKFYGGWDRLLNSLPDGWVYCDADGSQFDSSLTPYLLNAVLEMRLRLMEEWDLGEQMLKNLYTEIVYTPILTPDGTVVKKFKGNNSGQPSTVVDNTLMVIMAVYYAAEKLGIKGNLEDTLVFFANGDDLLIAIKPECESYLDKFEGLFSELGLKYDFSSRTKNKGDLWFMSH

SEQ ID NO: 230 - protein, 188 aa, Wheat stripe mosaic virus
RVYRFQLKDIEKPFKDAIVDLGKAGQGILAWSKEAHVMFMLAFRVLNDLLLKSLKPWVVYDNSMSEEQFLDKVNAAMTVTPDCAVNSVIDATACDSGQNGFTQLIERQIYARLGASELLLDWYFSFREKYILQAEHVRAPMENVKTSGEPGTLLGNSILMAAILNALVRGSGPFVLVMKGDDGFKRQA

SEQ ID NO: 231 - protein, 401 aa, Rice yellow mottle virus
KQSLTSLILQAGRFNRTVCPPGLAQAVQSLQERYPKVPPRRCLRDEWRFDDIFDEVERILCETGEVNSASSPGVPLAGLANSNGEVRGLARDLVCLAVVERLNALASVDPRQHNWTPRELVEKGLCDPVRLFVKNEPHPRRKLLERRFRLISSVSLVDQLVERMLFGPQNNTEISTWWQWPSKPGMGLLTPEQIRLVWDDVFQKHQAHPAAEADISGFDWSVQDWELWSDLAIRINRGNFQGNLRRAAISRYYCFMNSVFQLSDGTLIQQELPGLMKSGSYCTSSTNSRIRCLMAELIGSPWCIAMGDDSVEGWIEGAQSKYAALGHTCKEYYPCKTRGRELLEFNFCSHLIRRGHAELTSWPKALFRFLSSKHEDFEDLWVELHTCGVWSRIERYLRGIG

SEQ ID NO: 232 - protein, 235 aa, Maize dwarf mosaic virus
GKLGIWNGSLKAEIRPIEKTEANKTRTFTAAPLETLLAGKVCVDDFNNQFYAHHLNGPWTVGITKFYGGWNRLLEKLPDGWIYCDADGSQLDSSLTPYLINAVLNIRLQFMEPWNIGEQMLKNLYTEIVFTPIATPDGSVIKKFKGNNSGQPSTVVGNTLMVIIAFNYTLLSCGVDLEKADDVCRMYANGDDLLLAVNPTHVDILNEFGKHFAALGLNFDFESRTRDKSELWFMS

SEQ ID NO: 233 - protein, 167 aa, Zucchini yellow mosaic virus
DFFKYNKPVTVNQLDHDKFLEAVDGVIRMMCDFEFNECRFITDPEEIYNSLNMKAAIGAQYRGKKKEYFEGLDDFDRERLLFQSCERLFNGYKGLWNGSLKAELRPLEKVRANKTRTFTAAPIDTLLGAKVCVDDFNNEFYSKNLKCPWTVGMTKFYGGWDRLMRSL

SEQ ID NO: 234 - protein, 236 aa, Watermelon mosaic virus
GEKGIWNGSLKAELRPIEKVQANKTRTFTAAPIDTLLGAKVCVDDFNNQFYSFNLKCPWTVGMTKFYGGWDKLMRSLPDGWTYCHADGSQFDSSLTPLLLNAVLSIRCCFMEDWWVGKEMLENLYAEIVYTPILAPDGTIFKKFRGNNSGQPSTVVDNTLMVVIAMYYSCCKQGWSEEDIEERLVFFANGDDIILAVRDEDVWLYDTLSASFAELGLNYNFDERTKKREELWFMSH

SEQ ID NO: 235 - protein, 235 aa, Sugarcane mosaic virus
GNLGIWNGSLKAEIRPIEKTTLNKTRTFTAAPLETLLGGKVCVDDFNNQFYSHHLQGPWTVGITKFYGGWNRLLEKLPDGWIYCDADGSQFDSSLTPYLINAVVKIRLQFMEEWDLGERMLQNLYTEIVYTPIATPDGSVIKKFKGNNSGQPSTVVDNTLMVILAFNYAMLSSGIREDEIDNCCKMFANGDDLLLAVHPDFEYILDGFQNHFSNLGLNFDFTSRTKEKSDLWFMS

SEQ ID NO: 236 - protein, 1616 aa, Tobacco mosaic virus
MAYTQTATTSALLDTVRGNNSLVNDLAKRRLYDTAVEEFNARDRRPKVNFSKVISEEQTLIATRAYPEFQITFYNTQNAVHSLAGGLRSLELEYLMMQIPYGSLTYDIGGNFASHLFKGRAYVHCCMPNLDVRDIMRHEGQKDSIELYLSRLERGGKTVPNFQKEAFDRYAEIPEDAVCHNTFQTMRHQPMQQSGRVYAIALHSIYDIPADEFGAALLRKNVHTCYAAFHFSENLLLEDSYVNLDEINACFSRDGDKLTFSFASESTLNYCHSYSNILKYVCKTYFPASNREVYMKEFLVTRVNTWFCKFSRIDTFLLYKGVAHKSVDSEQFYTAMEDAWHYKKTLAMCNSERILLEDSSSVNYWFPKMRDMVIVPLFDISLETSKRTRKEVLVSKDFVFTVLNHIRTYQAKALTYANVLSFVESIRSRVIINGVTARSEWDVDKSLLQSLSMTFYLHTKLAVLKDDLLISKFSLGSKTVCQHVWDEISLAFGNAFPSVKERLLNRKLIRVAGDALEIRVPDLYVTFHDRLVTEYKASVDMPALDIRKKMEETEVMYNALSELSVLRESDKFDVDVFSQMCQSLEVDPMTAAKVIVAVMSNESGLTLTFERPTEANVALALQDQEKASEGALVVTSREVEEPSMKGSMARGELQLAGLAGDHPESSYSKNEEIESLEQFHMATADSLIRKQMSSIVYTGPIKVQQMKNFIDSLVASLSAAVSNLVKILKDTAAIDLETRQKFGVLDVASRKWLIKPTAKSHAWGVVETHARKYHVALLEYDEQGVVTCDDWRRVAVSSESVVYSDMAKLRTLRRLLRNGEPHVSSAKVVLVDGVPGCGKTKEILSRVNFDEDLILVPGKQAAEMIRRRANSSGIIVATKDNVKTVDSFMMNFGKSTRCQFKRLFIDEGLMLHTGCVNFLVAMSLCEIAYVYGDTQQIPYINRVSGFPYPAHFAKLEVDEVETRRTTLRCPADVTHYLNRRYEGFVMSTSSVKKSVSQEMVGGAAVINPISKPLHGKILTFTQSDKEALLSRGYSDVHTVHEVQGETYSDVSLVRLTPTPVSIIAGDSPHVLVALSRHTCSLKYYTVVMDPLVSIIRDLEKLSSYLLDMYKVDAGTQXQLQIDSVFKGSNLFVAAPKTGDISDMQFYYDKCLPGNSTMMNNFDAVTMRLTDISLNVKDCILDMSKSVAAPKDQIKPLIPMVRTAAEMPRQTGLLENLVAMIKRNFNAPELSGIIDIENTASLVVDKFFDSYLLKEKRKPNKNVSLFSRESLNRWLEKQEQVTIGQLADFDFVDLPAVDQYRHMIKAQPKQKLDTSIQTEYPALQTIVYHSKKINAIFGPLFSELTRQLLDSVDSSRFLFFTRKTPAQIEDFFGDLDSHVPMDVLELDISKYDKSQNEFHCAVEYEIWRRLGFEDFLGEVWKQGHRKTTLKDYTAGIKTCIWYQRKSGDVTTFIGNTVIIAACLASMLPMEKIIKGAFCGDDSLLYFPKGCEFPDVQHSANLMWNFEAKLFKKQYGYFCGRYVIHHDRGCIVYYDPLKLISKLGAKHIKDWEHLEEFRRSLCDVAVSLNNCAYYTQLDDAVWEVHKTAPPGSFVYKSLVKYLSDKVLFRSLFIDGSSC

SEQ ID NO: 237 - protein, 1616 aa, Tomato mosaic virus
MAYTQTATSSALLETVRGNNTLVNDLAKRRLYDTAVDEFNARDRRPKVNFSKVVSEEQTLIATKAYPEFQITFYNTQNAVHSLAGGLRSLELEYLMMQIPYGSLTYDIGGNFASHLFKGRAYVHCCMPNLDVRDIMRHEGQKDSIELYLSRLERGNKHVPNFQKEAFDRYAEMPNEVVCHDTFQTCRHSQECYTGRVYAIALHSIYDIPADEFGAALLRKNVHVCYAAFHFSENLLLEDSHVNLDEINACFQRDGDRLTFSFASESTLNYSHSYSNILKYVCKTYFPASNREVYMKEFLVTRVNTWFCKFSRIDTFLLYKGVAHKGVDSEQFYKAMEDAWHYKKTLAMCNSERILLEDSSSVNYWFPKMRDMVIVPLFDISLETSKRTRKEVLVSKDFVYTVLNHIRTYQAKALTYSNVLSFVESIRSRVIINGVTARSEWDVDKSLLQSLSMTFFLHTKLAVLKDDLLISKFALGPKTVSQHVWDEISLAFGNAFPSIKERLINRKLIKITENALEIRVPDLYVTFHDRLVSEYKMSVDMPVLDIRKKMEETEEMYNALSELSVLKNSDKFDVDVFSQMCQSLEVDPMTAAKVIVAVMSNESGLTLTFEQPTEANVALALQDSEKASDGALVVTSRDVEEPSIKGSMARGELQLAGLSGDVPESSYTRSEEIESLEQFHMATASSLIHKQMCSIVYTGPLKVQQMKNFIDSLVASLSAAVSNLVKILKDTAAIDLETRQKFGVLDVASKRWLVKPSAKNHAWGVVETHARKYHVALLEHDEFGIITCDNWRRVAVSSESVVYSDMAKLRTLRRLLKDGEPHVSSAKVVLVDGVPGCGKTKEILSRVNFEEDLILVPGRQAAEMIRRRANASGIIVATKDNVRTVDSFLMNYGKGARCQFKRLFIDEGLMLHTGCVNFLVEMSLCDIAYVYGDTQQIPYINRVTGFPYPAHFAKLEVDEVETRRTTLRCPADVTHFLNQRYEGHVMCTSSEKKSVSQEMVSGAASINPVSKPLKGKILTFTQSDKEALLSRGYADVHTVHEVQGETYADVSLVRLTPTPVSIIARDSPHVLVSLSRHTKSLKYYTVVMDPLVSIIRDLERVSSYLLDMYKVDAGTQXQLQVDSVFKNFNLFVAAPKTGDISDMQFYYDKCLPGNSTLLNNYDAVTMKLTDISLNVKDCILDMSKSVAAPKDVKPTLIPMVRTAAEMPRQTGLLENLVAMIKRNFNSPELSGVVDIENTASLVVDKFFDSYLLKEKRKPNKNFSLFSRESLNRWIAKQEQVTIGQLADFDFVDLPAVDQYRHMIKAQPKQKLDLSIQTEYPALQTIVYHSKKINAIFGPLFSELTRQLLDSIDSSRFLFFTRKTPAQIEDFFGDLDSHVPMDVLELDVSKYDKSQNEFHCAVEYEIWRRLGLEDFLAEVWKQGHRKTTLKDYTAGIKTCLWYQRKSGDVTTFIGNTVIIASCLASMLPMEKLIKGAFCGDDSLLYFPKGCEYPDIQQAANLMWNFEAKLFKKQYGYFCGRYVIHHDRGCIVYYDPLKLISKLGAKHIKDWDHLEEFRRSLCDVAESLNNCAYYTQLDDAVGEVHKTAPPGSFVYKSLVKYLSDKVLFRSLFLDGSSC

SEQ ID NO: 238 - protein, 1601 aa, Turnip vein-clearing virus
MAQFQQTIDMQTLQAAAGRNSLVNDLASRRVYDNAVEELNARSRRPKVHFSKAVSTEQTLIATNAYPEFEISFTHTQSAVHSLAGGLRSLELEYLMMQVPFGSLTYDIGGNFSAHLFKGRDYVHCCMPNLDVRDIARHEGHKEAIYSYVNRLKRQQRPVPEYQRAAFNNYAENPHFVHCDKPFQQCELTTAYGTDTYAVALHSIYDIPVEEFGSALLRKNVKTCFAAFHFHENMLLDCDTVTLDEIGATFQKSGDNLSFFFHNESTLNYTHSFSNIIKYVCKTFFPASQRFVYHKEFLVTRVNTWYCKFTRVDTFTLFRGVYHNNVDCEEFYKAMDDAWHYKKTLAMLNAERTIFKDNAALNFWFPKVRDMVIVPLFDASITTGRMSRREIMVNKDFVYTVLNHIKTYQAKALTYANVLSFVESIRSRVIINGVTARSEWDTDKAILGPLAMTFFLITKLGHVQDEIILKKFQKFDRTTNELIWTSLCDALMGVIPSVKETLVRGGFVKVAEQALEIKVPELYCTFADRLVLQYKKAEEFQSCDLSKPLEESEKYYNALSELSVLENLDSFDLEAFKTLCQQKNVDPDMAAKVVVAIMKSELTLPFKKPTEEEISESLKPGEGSCAEHKEVLSLQNDAPFPCVKNLVEGSVPAYGMCPKGGGFDKLDVDIADFHLKSVDAVKKGTMMSAVYTGSIKVQQMKNYIDYLSASLAATVSNLCKVLRDVHGVDPESQEKSGVWDVRRGRWLLKPNAKSHAWGVAEDANHKLVIVLLNWDDGKPVCDETWFRVAVSSDSLIYSDMGKLKTLTSCSPNGEPPEPNAKVILVDGVPGCGKTKEIIEKVNFSEDLILVPGKEASKMIIRRANQAGVIRADKDNVRTVDSFLMHPSRRVFKRLFIDEGLMLHTGCVNFLLLLSQCDVAYVYGDTKQIPFICRVANFPYPAHFAKLVADEKEVRRVTLRCPADVTYFLNKKYDGAVMCTSAVERSVKAEVVRGKGALNPITLPLEGKILTFTQADKFELLEKGYKDVNTVHEVQGETYEKTAIVRLTSTPLEIISSASPHVLVALTRHTTCCKYYTVVLDPMVNVISEMEKLSNFLLDMYRVEAGVQYQLQIDAVFRDSNLFVQTPKSGDWRDMQFYYDALLPGNSTILNEFDAVTMNLRDISLNVKDCRIDFSKSVQLPKEQPIFLKPKIRTAAEMPRTAGLLENLVAMIKRNMNAPDLTGTIDIEDTASLVVEKFWDSYVDKEFSGTNEMTMTRESFSRWLSKQESSTVGQLADFNFVDLPAVDEYKHMIKSQPKQKLDLSIQDEYPALQTIVYHSKKINAIFGPMFSELTRMLLERIDSSKFLFYTRKTPAQIEDFFSDLDSTQAMEILELDISKYDKSQNEFHCAVEYKIWEKLGIDEWLAEVWKQGHRKTTLKDYTAGVKTCLWYQRKSGDVTTFIGNTIIIAACLSSMIPMDKVIKAAFCGDDSLIYIPKGLDLPDIQAGANLMWNFEAKLFRKKYGYFCGRYVIHHDRGAIVYYDPLKLISKLGCKHIRDVVHLEELRESLCDVASNLNNCAYFSQLDEAVAEVHKTAVGGSFAFCSIIKYLSDKRLFRDLFFV

SEQ ID NO: 239 - protein, 1612 aa, Pepper mild mottle virus
MAYTQQATNAALASTLRGNNPLVNDLANRRLYESAVEQCNAHDRRPKVNFLRSISEEQTLIATKAYPEFQITFYNTQNAVHSLAGGLRSLELEYLMMQIPYGSTTYDIGGNFAAHMFKGRDYVHCCMPNMDLRDVMRHNAQKDSIELYLSKLAQKKKVIPPYQKPCFDKYTDDPQSVVCSKPFQHCEGVSHCTDKVYAVALHSLYDIPADEFGAALLRRNVHVCYAAFHFSENLLLEDSYVSLDDIGAFFSREGDMLNFSFVAESTLNYTHSYSNVLKYVCKTYFPASSREVYMKEFLVTRVNTWFCKFSRLDTFVLYRGVYHRGVDKEQFYSAMEDAWHYKKTLAMMNSERILLEDSSSVNYWFPKMKDMVIVPLFDVSLQNEGKRLARKEVMVSKDFVYTVLNHIRTYQSKALTYANVLSFVESIRSRVIINGVTARSEWDVDKALLQSLSMTFFLQTKLAMLKDDLVVQKFQVHSKSLTEYVWDEITAAFHNCFPTIKERLINKKLITVSEKALEIKVPDLYVTFHDRLVKEYKSSVEMPVLDVKKSLEEAEVMYNALSEISILKDSDKFDVDVFSRMCNTLGVDPLVAAKVMVAVVSNESGLTLTFERPTEANVALALQPTITSKEEGSLKIVSSDVGESSIKEVVRKSEISMLGLTGNTVSDEFQRSTEIESLQQFHMVSTETIIRKQMHAMVYTGPLKVQQCKNYLDSLVASLSAAVSNLKKIIKDTAAIDLETKEKFGVYDVCLKKWLVKPLSKGHAWGVVMDSDYKCFVALLTYDGENIVCGETWRRVAVSSESLVYSDMGKIRAIRSVLKDGEPHISSAKVTLVDGVPGCGKTKEILSRVNFDEDLVLVPGKQAAEMIRRRANSSGLIVATKENVRTVDSFLMNYGRGPCQYKRLFLDEGLMLHPGCVNFLVGMSLCSEAFVYGDTQQIPYINRVATFPYPKHLSQLEVDAVETRRTTLRCPADITFFLNQKYEGQVMCTSSVTRSVSHEVIQGAAVMNPVSKPLKGKVITFTQSDKSLLLSRGYEDVHTVHEVQGETFEDVSLVRLTPTPVGIISKQSPHLLVSLSRHTRSIKYYTVVLDAVVSVLRDLECVSSYLLDMYKVDVSTQXQLQIESVYKGVNLFVAAPKTGDVSDMQYYYDKCLPGNSTILNEYDAVTMQIRENSLNVKDCVLDMSKSVPLPRESETTLKPVIRTAAEKPRKPGLLENLVAMIKRNFNSPELVGVVDIEDTASLVVDKFFDAYLIKEKKKPKNIPLLSRASLERWIEKQEKSTIGQLADFDFIDLPAVDQYRHMIKQQPKQRLDLSIQTEYPALQTIVYHSKKINALFGPVFSELTRQLLETIDSSRFMFYTRKTPTQIEEFFSDLDSNVPMDILELDISKYDKSQNEFHCAVEYEIWKRLGLDDFLAEVWKHGHRKTTLKDYTAGIKTCLWYQRKSGDVTTFIGNTIIIAACLSSMLPMERLIKGAFCGDDSILYFPKGTDFPDIQQGANLLWNFEAKLFRKRYGYFCGRYIIHHDRGCIVYYDPLKLISKLGAKHIKNREHLEEFRTSLCDVAGSLNNCAYYTHLNDAVGEVIKTAPLGSFVYRALVKYLCDKRLFQTLFLE

SEQ ID NO: 240 - protein, 775 aa, Turnip crinkle virus
MPLLHTLNTALAVGLLGARYYPEVQTFLGLPDYVGHMKNVVRSVFQGSGLVVVSSDTVGVRGTYSNRGQIGSSLGCILAVPDSGADIEIDLDRLVGTEEEATSCLVEAVGSTADVPRRRVRQKGRFAMHAVNAAKLHFCGVPKPTEANRLAVSKWLVQYCKERHVVDSHIRTIVNTALPRVFTPDAEDIQVVLDLHSVRAHDHRNALAEAGKVRKWWVNLAMHPMTGRSWSRAWRRLCRLPDDQAISFVRXGCLRELVGRETQISRGENPAMRVFPLANPPKVRRIFHICGMGNGLDFGVHNNSLNNLRRGLMERVFYVEDAQKQLKPAPQPIPGIFGKLSGIRRRLVRLAGNHTPVPREKYPSFYKGRRATIYQKALDSLHDRPVSRKDAELKTFVKAEKINFTAKKDPAPRVIQPRDPRYNIEVGKYLKPYEHHLYRAIDAMWGGPTVLKGYDVGELGNIMSNTWDKFRKTCAIGFDMKRFDQHVSVDALRWEHSVYNAGFNCPELAQLLTWQLTNKGVGRASDGFIKYQVDGCRMSGDVNTALGNCLLACSITKYLMKGIKCKLINNGDDCVLFFEADEVDRVRERLHHWIDFGFQCIAEEPQYELEKVEFCQMSPIFDGEGWVMVRNPRVSLSKDSYSTTQWANEKDAARWLAAIGECGLAIAGGVPVLQSYYSCLKRNFGPLAGDYKKKMQDVSFDSGFYRLSKNGMRGSKDVSQDARFSFYRGFGYTPDEQEALEEYYDNLELLCEWDPTGYKEELSDRWILNEFPTTL

SEQ ID NO: 241 - protein, 250 aa, Turnip crinkle virus
MPLLHTLNTALAVGLLGARYYPEVQTFLGLPDYVGHMKNVVRSVFQGSGLVVVSSDTVGVRGTYSNRGQIGSSLGCILAVPDSGADIEIDLDRLVGTEEEATSCLVEAVGSTADVPRRRVRQKGRFAMHAVNAAKLHFCGVPKPTEANRLAVSKWLVQYCKERHVVDSHIRTIVNTALPRVFTPDAEDIQVVLDLHSVRAHDHRNALAEAGKVRKWWVNLAMHPMTGRSWSRAWRRLCRLPDDQAISFVR

SEQ ID NO: 242 - protein, 818 aa, Tomato bushy stunt virus
METIKRMIWPKKEIFVGDFATGVNRTVPVNIFQLVCRVVLRYMRTGKIECDSDSMTKFIVELLKTDCAAKWEWFMKRRQRGDYIVPLSIASIPIIPLLSYATRVRAVSVKAFGNELSFNVRVPRPSVPKKGLLLRLAAGLALAPICALAVYATLPREKLSVFKLRTEARAHMEDEREATDCLVVEPARELKGKDGEDLLTGSRLTKVIASTGRPRRRPYAAKIAQVARAKVGYLKNSPENRLIYQRVMIEIMDKDCVRYVDRDVILPLAIGCCFVYPDGVEESAALWGSQESLGVKXGGLVRLPGVVTQINRDIPSDVLLPQEVLEVRTGPPNAKDRNIFMVAGCPSQARFLVHNHCLKNLKRGLVERVFCVERNGKLARTPQPTKGAFGRLSPFRKAVCEKVGVAHRLGYDGFLSYYSGAKLRTYTRAVESLHITPVSERDSHLTTFVKAEKISTSKGDPAPRVIQPRNPRYNVELGRYLRHMESKLMKAVDGVFGETTCIKGYTADEVGAIFRAKWDRFDKPVAIGLDASRFDQHCSVEALQYEHSFYRAMYPGNKLLGKLLEWQLHNKGKGYVPDGTITYRKEGCRMSGDINTSLGNYLLMCAMVHGYMRHLGINEFSLANCGDDCVLIVERRNLKQIQRTLPEYFLNLGYTMKVEQPVFQLEEVEFCQAHPVQFQGGWKMVRNVRTAMSKDVHCVNNIRDLATRRAWSNAQHHGGLALSAGIPVVETFYSRFKLYDVPRKHQRIDTVTNVHKWRGSGGSYVVTPESRASFWAAFGLTGDEQLALEDRLERWEMDLFGEEGVDAHEPSILDSAVA

SEQ ID NO: 243 - protein, 296 aa, Tomato bushy stunt virus
METIKRMIWPKKEIFVGDFATGVNRTVPVNIFQLVCRVVLRYMRTGKIECDSDSMTKFIVELLKTDCAAKWEWFMKRRQRGDYIVPLSIASIPIIPLLSYATRVRAVSVKAFGNELSFNVRVPRPSVPKKGLLLRLAAGLALAPICALAVYATLPREKLSVFKLRTEARAHMEDEREATDCLVVEPARELKGKDGEDLLTGSRLTKVIASTGRPRRRPYAAKIAQVARAKVGYLKNSPENRLIYQRVMIEIMDKDCVRYVDRDVILPLAIGCCFVYPDGVEESAALWGSQESLGVK

SEQ ID NO: 244 - protein, 2879 aa, Tomato spotted wilt orthotospovirus
MNIQKIQKLIENGTTLLLSIEDCVGSNHDLALDLHKRNSDEIPEDVIINNNAKNYETMRELIVKITADGEGLNKGMATVDVKKLGEMVSLFEQKYLETELARHDIFGELISRHLRIKPKQRSEVEIEHALREYLDDLNKKSCVNKLSDDEFERINKEYVATNATPDNYVIYKESKNSELCLIIYDWKISVDARTETKTMEKYYKNIWKSFKDIKVNGKPFLEDHPVFVSIVILKPIAGMPITVTSSRVLGKFEDSPSALHGERVKHARNAKLLNISYVGKIVGTTPTVVRNYYANTQKIKSEVRGILGDDFGSKDVFFSHWTSKYKERNPTEIAYSEDIERIINSLVTEEIPKEEIIHFLFGNFCFHIETMNDQHIADKFKGYQNSCINLKIEPKADLADLKDHLIQKQQIWESLYGKHLEKIMLRIREKKKKEKEIPDITTAFNQNATEYEEKYPNCFTNDLSETKTNFSMTWSPSFEKIELGSEVDYNNAIINKFRESFKSSSRIIYNSPYSSINNQTNKARDITNLVRLCLTELSCDTTKMEKQELEDEIDINTGSIKVERTKKSKEWSKQGSCLTRNKNEFCMKETGKENKTTYFKGLAVMNIGMSSKKRILKKEEIKERISKGLEYDTSERQADPNDDYSSIDMSSLTHRKKLIRHDNEDSLSWCERIKDSLFILHNGDIREEGKITSVYNNYAKNPECLYIQDSVLKAELETCKKINKLCNDLAIYHYSEDMMQFSKGLMVADRYMTKESFKILTTANTSMLLLAFKGDGMNTGGSGVPYIALHIVDEDMSDQFNICYTKEIYSYFRSGSNYIYIMRPQRLNQVRLLSLFKTPSKVPVCFAQFSKKANEMEKWLKNKDIEKVNVFSMTMTVKQILINIVFSSVMIGTVTKLSRMGIFDFMRYAGFLPLSDYSNIKEYIRDKFDPDITNVADIYFVNGIKKLLFRMEDLNLSTNAKPVVVDHENDIIGGITNLNIKCPITGSTLLTLEDLYNNVYLAIYMMPKSLHNHVHNLTSLLNVPAEWELKFRKELGFNIFEDIYPKKAMFDDKDLFSINGALNVKALSDYYLGNIDNVGLMRSEIENKEDFLSPCYKISTLKSSKKCSQSNIISTDEIIECLQNAKIQDIENWKGNNLAIIKGLIRTYNEERNRLVEFFEDNCVNSLYLVEKLKEIINSGLITAGKSVTSKFIRNNHPLTVETYLKTKLYYRNNVTVLKSKKVSEELYDLVKQFHNMMEIDLDSVMNLGKGTEGKKHTFLQMLEFVMSKAKNVTGSVDFLVSVFEKMQRTKTDREIYLMSMKVKMMLYFIEHTFKHVAQSDPSEAISISGDNKIRALSTLSLDTITSYNDILNKNSKKSRLAFLSADQSKWSASDLTYKYVLAIILNPILTTGEASLMIECILMYVKLKKVCIPTDIFLNLRKAQGTFGQNETAIGLLTKGLTTNTYPVSMNWLQGNLNYLSSVYHSCAMKAYHKTLECYKDCDFQTRWIVHSDDNATSLIASGEVDKMLTDFSSSSLPEMLFRSIEAHFKSFCITLNPKKSYASSSEVEFISERIVNGAIIPLYCRHLANCCTESSHISYFDDLMSLSIHVTMLLRKGCPNEVIPFAYGAVQVQALSIYSMLPGEVNDSIRIFKKLGVSLKSNEIPTNMGGWLTSPIEPLSILGPSSNDQIIYYNVIRDFLNKKSLEEVKDSVSSSSYLQMRFRELKEKYERGTLEEKDKKMIFLTNLFEKASVSEDSDVLTIGMKFQTMLTQIIKLPNFINENALNKMSSYKDFSKLYPNLKKNEDLYKSTKNLKIDEDAVLEEDELYEKIASSLEMESVHDIMIKNPETILIAPLNDRDFLLSQLFMYTSPSKRNQLSNQSTEKLALDRVLRSKARTFVDISSTVKMTYEENMEKKILEMLKFDLDSYCSFKTCVNLVIKDVNFSMLIPILDSAYPCESRKRDNYNFRWFQTEKWIPVVEGSPGLVVMHAVYGSNYIENLGLKNIPLTDDSINVLTSTFGTGLIIEDVKSLVKGKDSFETEAFSNSNECQRLVKACNYMIAAQNRLLAINTCFTRKSFPFYSKFNLGRGFISNTLALLSTIYSKEESYHFVSTASYKLDKTIRTVISAQQDMNLEKILDTAVYISDKLQSLFPTITREDIALILQNVCLDSKPIWQSLEDKMKRINNSTASGFTVSNVILSHNSELNTIQKQIVWMWNMGLCSHRTLDFVIRYIRRSDVRYVKTEEQDESRNYVSGTMYKIGIMTRSCYVQLIASDHDVAVSLRTPFEILNEREYLFDTYRESIEKLLQKFMFDKVNIIKSKQPQIVFLEPGDACIRMTTDNKMIVKVNATSRQIRLENVKLVVKIKYENVNSDVWDIIEGQKSLVLRLPEVGECFSDMYKTADSETETIKTIKNRLMTSLTFIEAFGNLSQQIKEIVYDDIRETMDEFLMNIRDTCLEGLENCKSVEEYDNYLDEDGFNDTVELFENLLRTHDNFEDEYSPLFSEIVDKAKQYTRDLEGFKEILLMLKYSLINDASGFKSYRATGMHAVELMAKKHIEIGEFNLLGMIQLIKACETCHNNDSILNLASLRNVLSRTYATFGRRIGLNHDLDLQNNLMEKSCDFKTLVLPDIKLSELSREILKENGFVISGENLKMDRSDEEFEGLASFNVLRLDEEEMYEGLIKEMKIKRKKKGFLFPANTLLLSELIKFLIGGIKGTSFDIETLLRNSFRPDIFSTDRLGRLSSSVPALRVYATVYMEYKNANCPLNEIADSLEGYLKLTKSKPKEHFLHGRVKKALIQLRDEQSRTKKLEVYKDIANFLSRHPLCLSEKTLYGRYTYSDINDYIMQTREIILSKISELDEVVETDEDNFLLSYLRGEEDAFDEDEIDEEEDTD

SEQ ID NO: 245 - protein, 2878 aa, Watermelon bud necrosis orthotospovirus
MNIQTINSFLDASGETTAYLQRIKDEIMLMSNVIEQGYSEGKGVIESGLSSIMSMNYILDKIEDMKSKYHQSSSSIDQREMETEIYLFLDKYKELELMRHDLFGVLAGRRLHFVPKHRSDVFMKDCLMSYIEFCSASVSISNKIDNLDSLKEKLIFQHLTPDNYTIYKETKGEKACLMIYDWKVSVDAVSEGKTSENYYTSVWKTFKDITIDEEPFLERHPIFITIVVLNPSGNMPIVATTCRVVQEFRNSPYKTFNDRKRAAEAAKLISVNSLGQLIGLGADCFRRFYSETQSFKNSLLSKVGKYMNRSSEVFFSHWSCEYRKTNLSNNQISQDIIDLINSLPNDVVGKEILVHFLFGNYLYFKETMSELHLKDRFEGYRSHCKMMRIRPLENEEKLKDYLDRNEHIFESLYETHLKKIKSDVLLRKSKEIEIESIERAFNINAEEYQKEYPGCFTNDLQETKTNFSICWSPMTEELKMNDLNYNNAIIQSFRDALSEQPKLIHHKSYGGAKVDTYFSTTLFNLVRACLVDLSTDTTGHSKATLEDVVDIKDGSIQVKRTEASQRWREIGNVKTRNGNEFTLSPQADTEARKNFFRGLNLMYVDMGKKKKIDIKNELKSKIQESMAQQKNENMDGPSGEYDVSKANIPHQTSLKGITHNKKLIRHDNPDVKYHCESMIESMYVLHGMDERKDKNSKINSVYNEYCSNPSSLFTKGNLIETEMTIAKNIHEVAKELSIYTYSEDMMQMAKGLMVADRFMKKTDFKILTCANTSMICLAFKGDGINTGKSGVPYITIHKVDKSIQPHFVSLYTKELIVSFKSENYFINIMRPQRLNQVRLLSLFKAPSKVPILFSQYSLLSTEIKKWLNQQSIDVFTCPENKIQYLQKILFSSVIIGTVTKLSRMGIFDFMRYARFLPLSDYSNIKEYIAEKFDPDITNVIDCFFVSGIKNLLLKMEGINLSNSIKPLTIDQENDMSGGISDLDIICPITGSTLKTIECLYNNVYLAIYMMPKSLHTHVHNLTTLLSVPAEWEIKFREKMGFMIGDEIKPKKEMFNDSGPFSINGVLNVKTLFDYYKKNITNVGACRSNIEEKEDFLSAPYKIKTLTSSKKCSKADIIKSTEIVAALKSSYGKQPDDIKGSDLYILKGVLKCFDEDRDSLTNFLEVEGLEESKYLHFFTNMMSGDNKILMKTNQDKFYYKSHPLTVETFMKVRYGYFKTTTVLKSKKVSEELYDLIKEFNKITEVDLEALEKLGRGLKGNRVTFIQLLEFILMKSRTNAGNTDFLVSIFEKMQRTKMDREIYLMSMKTKMMLYFIEHTYKHVAQSDPSEAISISGDYKIKNLASLSYDTITNYNTALQKNLECKMAFLSADQSKWSASDLTYKYILAVIMNPLLTTGEINLMCECIMMYVKLKRVCIPTDIFLNLKRGQTEYGSYGTALSVLTDNLETNTFPVSMNWLQGNLNYLSSVYHSCAMMGYEKAMKKMGNYDFTIRWMVHSDDNATSMVVRGDIKELLAEFNCTSLSELLFRSIQSHFKSYCITLNPKKSYASESEVEFISERIINGAVIPLYCRHLANCSTESSHNSYFGDLMSLSIHITMLLRKGCPNELIPFAYAAIQIQFLSIYSMLPGEENDISTIVKEIDFPLSKREIPICAGGWMYAPIELLSILGPSSNDQLIYYKIILDFFNLKDFSSLKKSVNSLGYIDLRINELFKRIKYQKITNADKKMICMVNLFKTSLMSEDCDSLNVGMKFQSMITQIIKLPSFVSEGSLLKNSSFQDFCKLFPNLKKNTDILNALKPVNLDERSLEELNESKFLSQIQLEELSRHMASHPESFLIAPMNDKDYILTNLYTYSSVSKRNQMLNQSTEKLALDRILRSKAKTFLDPNSKEMVSYKENMSMKMREIMSYAGNDFKIINTISSLMVRDMNFEMVVSLMENTVANASIPKANYNFRWFITEKVPSVIEGSPGLIVMSAVYGMDYLIELGLKKLPLTETSISILHDIFGNRKTFDDVKECIQNVKKQYKTEEFQNADVLKRYVLSINYMIQSQNKLLSINTCFSRKNFPFYSKYNLGKTFITNTLAIWSTIYSRLTNINFYTNLNFVIDRSSRLIISLQRDMNLEKLIDCCAYVSDRLQSLFPDMTVESIRQVLCRLNFNGVDLMKKMKSEIAEVKRAINNIKTSTHVTLSFRPQMIAMSKHAAWLYNFGYINEKEFKFVIDQIRQSEVHYIKTDEQDVRGYYVSGHTYKIGIKTQHNYGQLAMSNQDVSIHLHSPYEYKREDDGKIWDVHVRSVYKLLQKLLMDKQSVIKAFLNIRTELMPNQFCIHESSNKTLLILINDTTRPISLERIKFKGDIKYIPSSDFAWDMMSNQSKYRLRQAETGECYTELYKLIDNNDNLMNTILTNLKKSLEYGNEMENLIEQSIQGIDDADTIEYIQESVDQIHKLAIEGLETCQTSDEFENYLKRVDFQSTVDFHKDLLEQIVEEKYGSAERLDVAVEKLTKWTNSLSTFKDVCTMLKFSMVNDSKGIKTYKANGADFHSLSASEVMTSQGFDLFELLKLIKACEACHTSNSVLNLIAFKNIKNKTFIPGFKRHLPNTVHFDYEMKLNNEVMNKFYEYKTISLQDIKVSDRVKRVLETNGFSITGHNLKLEETNLELNPVEIIDDSSTYDQVAKQMRLTKKKSSYLIPANTLLLGELMKFLMLCIKGEEHDIMKLLRSHFAMQPVRENRLLCIQDAVMTCRISGYIQRHFLNDKKEIVLLGVADSLENFISLATPNYATQEPFKAEALIKKALAEVYDSGKYKILKNIRNYIVDDVEFLTEKCLYSNITNEEISNMIFNAVSKIDLELSNLKPKKRKKRLDLHDVFNGFLGSDATTSEQQ

SEQ ID NO: 246 - protein, 1844 aa, Turnip yellow mosaic virus
MAFQLALDALAPTTHRDPSLHPILESTVDSIRSSIQTYPWSIPKELLPLLNSYGIPTSGLGTSHHPHAAHKTIETFLLCTHWSFQATTPSSVMFMKPSKFNKLAQVNSNFRELKNYRLHPNDSTRYPFTSPDLPVFPTIFMHDALMYYHPSQIMDLFLRKPNLERLYASLVVPPEAHLSDQSFYPKLYTYTTTRHTLHYVPEGHEAGSYNQPSDAHSWLRINSIRLGNHHLSVTILESWGPVHSLLIQRGTPPPDPSLQAPPTLMXSDLFRSYQEPRLDVVSFRIPDAIELPQATFLQQPLRDRLVPRAVYNALFTYTRAVRTLRTSDPAAFVRMHSSKPDHDWVTSNAWDNLQTFALLNVPLRPNVVYHVLQSPIASLSLYLRQHWRRLTATAVPILSFLTLLQRFLPLPIPLAEVKSITAFRRELYRKKEPHHPLDVFHLQHRVRNYHSAISAVRPASPPHQKLPHALQKAALLLLRPISPLLTATPFFRSEQKSMLPNAELSWTLKRFALPWQASLVLLALSESSILLHKLFSPPTLQAQHDTYHRHLHPGSYSLQWERTPLSIPRTTAFLPFTPTTSTAPPDRSEASLPPAFASTFVPRPPPAASSPGAQPPTTTAAPPTPIEPTQRTHQNSDLALESSTSTEPPPPPIRSPDXTPSAPVLFPEINSPRRFPPQLPATPDLEPAHTPPPLSIPHQDPTDSADPLMGSHLLHHSLPAPPTHPLPSSQLLPAPLTNDPTAIGPVLPFEELHPRRYPENTATFLTRLRSLPSNHLPQPTLNCLLSAVSDQTKVSEEHLWESLQTILPDSQLSNEETNTLGLSTEHLTALAHLYNFQATVYSDRGPILFGPSDTIKRIDITHTTGPPSHFSPGKRLLGSQPSAKGHPSDPLIRAMKSFKVSGNYLPFSEAHNHPTSISHAKNLISNMKNGFDGVLSLLDVSTGQRTGPXPKERIIQIDHYLDTNPGKTTPVVHFAGFAGCGKTYPIQQLLKTKLFKDFRVSCPTTELRTEWKTAMELHGSQSWRFNTWESSILKSSRILVIDEIYKMPRGYLDLSILADPALELVIILGDPLQGEYHSQSKDSSNHRLPSETLRLLPYIDMYCWWSYRIPQCIARLFQIHSFNAWQGVIGSVSTPHDQSPVLTNSHASSLTFNSLGYRSCTISSSQGLTFCDPAIIVLDNYTKWLSSANGLVALTRSRSGVQFMXPSSYVGGTNGSSAMFSDAFNNSLIIMDRYFPSLFPQLKLITSPLTTRGPKLNGATPSASPTHRSPNFHLPPHIPLSYDRDFVTVNPTLPDQGPETRLDTHFLPPSRLPLHFDLPPAITPPPVSTSVDPPQAKASPVYPGEFFDSLAAFFLPAHDPSTREILHKDQSSNQFPWFDRPFSLSCQPSSLISAKHAPNHDPTLLPASINKRLRFRPSDSPHQITADDVVLGLQLFHSLCRAYSRQPNSTVPFNPELFAECISLNEYAQLSSKTQSTIVANASRSDPDWRHTTVKIFAKAQHKVNDGSIFGSWKACQTLALMHDYVILVLGPVKKYQRIFDNADRPPNIYSHCGKTPNQLRDWCQEHLTHSTPKIANDYTAFDQSQHGESVVLEALKMKRLNIPSHLIQLHVHLKTNVSTQFGPLTCMRLTGEPGTYDDNTDYNLAVIYSQYDVGSCPIMVSGDDSLIDHPLPTRHDWPSVLKRLHLRFKLELTSHPLFCGYYVGPAGCIRNPLALFCKLMIAVDDDALDDRRLSYLTEFTTGHLLGESLWHLLPETHVQYQSACFDFFCRRCPRHEKMLLDDSTPALSLLERITSSPRWLTKNAMYLLPAKLRLAITSLSQTQSFPESIEVSHAESELLHYVQ

SEQ ID NO: 247 - DNA, 3199 bp, Solanum lycopersicum
  source 1..3199: mol_type = genomic DNA
tcccaaaactcattatttaattttcttctttaacaaagttgacgagacaaaagcaaaatatatacaggaaaaatgggtgatccgttgattgaagaaattgatgttctggatgcacctttaccatattctgtagagacgatgcttgatagaatctgcaaggagcaggggcaaaaaccaccgtgtactggcattagaaggaggctgagctctattggtgaaaaagggtcattagaaatgctcaaaataatatcacgtcgtcctatcaagaagagtctctctgcttttcttgtttacatgattgatcgctacccggattgtctctcctcttcctctagccccttcaattgtctactcaaacgctcttcttcccctcgtctctttccatctccagagggtaaacgtttacaaggtgaaagttcttctaaatcaaagcttgagatgggcttattggcctgtgcaagccctcagaaagttgctcgccagttatcattttgcgaggagcctgaatctaactgtagaagaacctccccttatgtcagccaacagttgatgatcctcaatgaacttgaatttagaaaattgtttctggtactgagctacattggatgcaacaagttggaagatgttatatcccctcaaattgctgatgatattgtaagaaagaaaaatctttccatgactgattttgaatcagaaatttggaatgcttttggaaaagcatgttatgctgtgtcagatagatcaaagtacttagactggaattgcagaaagacacatatctactattgccacattaagcagaacggatactgttccttcaagggtccatacttgaacacattaaggactcacttacagagagccctgggagatgacaatgtactgattgtaaaatttgttgaagatacaagttgtgccaatataattctcgaggaaggcattcttgttggcttgagacgttaccgtttctttgtgtataaagatgataaagagaggaagaaaagtccagctatgatgaagacaaaaactgcttctttgaagtgctactttgttaggtttgagtccattggaacctgcaatgatggagaatcctatgtattttctaccaaaacaatcagtcaagcaaggtgtaaattcatgcatgtgcatatggtttctaatatggcaaaatatgcagccaggctttccttaattctatcaaagacgattaagcttcaaacagatcttgattctgtcaccattgaaagaattgaagatatactttgtcgggatgaaaatggttgtattattcaagatgaagacggcgaacctcgtatacatactgatggtactggtttcatatcagaagatttagctatgcattgtcccaaagatttttcaaaagcagaatatataaaagatgaaaattatgagaattttgttgatatcgtggaccttgatgacgtgaatgtagaaagaagagtgagtgtatctcgcaataggaaaccgcctttgttgatgcagtgccgtttgttcttcaatggttgtgctgtgaaggggacttttcttgtcaatagaaagattggatcacgaaaaattcatattagaccctcaatggtgaaggttgagatagacccaacaatttcaagtataccaacttttgactcattggagatagttgcaatcagtcatagaccaaataaggcatatctgtccaagaatttaatctctctgctgagctacggaggagtccataaagaatactttatggaacttttgggaagtgcgctggaagagacgaaacaagtatatttgaggaaacgtgcagctctaaaagttgctatcaactatagagaaatggatgatgaatgtctaacagcaaggatgatatcgtctgggatacctctcaatgaacctcatctccatgctcgcttgtctaggcttgcaaagattgaaagaactaagcttagaggaggaaagcttcctataagtgacagtttttatcttatgggaacagctgaccccactggtgtactggaaagcaatgaagtctgtgttattctagataatggccaagtatctgggcgtgttttggtctatagaaatcctggtcttcactttggagatgtacatgtgatgaaagcgcgatatgtggaagagcttgcagatgttgttggtgatgccaaatatggtatatttttttcaactaaaggcccgaggtcagctgctactgagattgcaaatggtgactttgatggtgatatgtattgggtttccataaaccgtaagttggtagattcttatacaacaagtagaccatggattcgcatgcattcaactcctaacgcagttagcaaaaaaccaagtgaattttcagctgatgaattggaatatgagctttttaggcaatttctggaagcaaagtctaaaggtgccaatatgtctctggcagctgatagctggctggcatttatggatcgtcttctgacgctgcgagatgataatgtggatgatatgcatagcttgaaaggcaagatgcttcacctgattgacatctactatgatgcattagatgcacctaaaagcgggaagaaggttagcatccctcattatctgaaggcaaacaagttcccccactatatggaaaaagggaactcctgcagctatcattcaacttctattctgggtcagatttatgatcatgtcgactcatatccagatgaagatttgtgtataacagaaatctctaaactgccttgctttgaagttgaaatccctcaaagatgcatgacattgtggagaggaagatatgaagagtacaaaaaggatatgacacgggccatgaactttgattgtgaactaagaatcacctcttgcaatgaagttataaagaagtacaagatgttgctatatggtgctgtggagtttgaacaaacagtaagaaagactgaagacattttcgacgaggcccttgcaatatatcatgtaacatatgataatgcaaggatcacatacagcatagagaaatgtggttttgcttggaaagtagctggttctgcgctttgcaggatccacgccatgtatcgcaaggaaaaagacttgcccattttgccatcggttttgcaggaaatactctagacgtattgtaacattgaagtgatcaataaatatctacttagcattctattctatgtgatgacgtccaaatttacttctcaaa

SEQ ID NO: 248 - DNA, 4902 bp, Arabidopsis thaliana
  source 1..4902: mol_type = genomic DNA
gttgttgctgtctcctctctcaatggctacctcctgcgactgaaacggtaaacctttattctctttagattcgtgtgtattcatcagtatatggtcatgttacaataatatattgcttattaactgatcaatctgttactgtcctgccctgcttactatagtagacagtttctgtggttttgtaatacttaggcatgtgttaactattattagaggacttacagtgagttaaggtgtcttcgtgtgtgtttctctcaaaatgatatatttgttactctgtacatatatatatatatgctcgtggaatcctgatgagaatttggttacagctttatcaatcctctaaatagttttcaacagtgcaaggttttgtgttcctctcttgaaaatatagtctctgaagtgttaacgagctctatatgactgtttgcagagttcaggcagcaatgtaaatgagctggagaatataagcaatgataggactgagtcaatagttcaagaacgtgaaggttctgacaactaagcaaactgcttcttcaatttggttcgataactgtagataaattgtgataaaatatcttttatttgatcaatcattacattattgtagagaatcctcagccaagagattggtagctagatagataaggttgacttggagtcaacttcttccttatagctttcttcatttaatatagtaaacgtttttaactcatttttttccagagaatctgtacccttggcgttcttgtactggttcatcgtagatgattctcgacgactagttgttatggctgaagcatttgtgtcgtttggacttgagaagctttgggatctcctgagtcgagaatcagagcgattgcagggaattgatgggcaacttgatggactaaagcgtcagctgagaagtttacagtcgttgttgaaagatgcagatgccaagaaacatggaagtgatagggtgaggaatttcttggaagatgtcaaagaccttgtttttgatgctgaggatataattgaatcctatgttctgaacaaacttagtggaaaaggaaaaggggtcaagaagcatgtgagacgacttgcttgcttcttgacggatcgccacaaggttgcttcagatatcgagggtatcactaagaggatctctgaagtgattggggaaatgcagagttttgggatacaacaaatcattgatggtggtcgttcgctgtctcttcaggaaagacaaagggtgcagagggagatccgacaaacgtatcctgacagttctgaaagcgatcttgtcggggtggagcagagtgttaaagaattggttggtcatttggtggagaatgatgttcatcaagtggtttctatagctgggatgggcggtattggtaaaaccactctggctagacaagtctttcatcatgacttagtccggcgtcactttgatggattcgcatgggtctgtgtttcccaacaatttacacagaaacatgtttggcagaggatcttgcaagaacttcagccacatgatggggatattttacagatggacgaatatgcacttcagcgtaaactctttcaattgttagaggccggtagatatttagttgtcctcgatgatgtatggaaaaaagaagactgggatgtaataaaagcagtgtttccacggaaaagaggtgagctcttatggtacatacatgaagcactttttcttcttaattcataaaagtgattgttaaaaaagaaatatatagaataattgccttttttattccctagcatgagaaacacaaatatttttgcaggttggaagatgctgcttacttctcgaaatgaaggtgttgggatacatgctgatccaacatgtttaacttttagagcaagcatccttaaccctgaagaaagttggaagctctgtgagagaatagtattccctaggagagatgaaactggtacatatcttattatataatgtttagtttctctaacttttaagaaaaatacatttacatatactaatttacatgtatatatttatattattttataaattttaattttccttaaccaaaaagtaatatttgtatacatattgctattttttccttactattagaacaactaactaaaaacgtatggtaatccatatgctaatttaggcatgtataaaaaaaaaagtcaatggtaatcttgattttgaccaaaaaataattaatttaattagcatgaacaatgagtgttgttaaggttcaaaaggacaatataattattaaacattaatttaattggataacaattaaaaaaattaactattaatcctagtacagtaagtcagtaattacgaatcttgaaaattggttttggtttttttcttcctattttttataggtttattcaaattagaaatatcgaattatctacttttatggtttattcatgattggtttgattaaaatttaacgtaataaaatcaactaaatttgaaagaaacatgtattgattaacccgtgattacacgattccttgtaataaagttcaaatagaatactaagaccaagaatctagtgtattattttaatttggcagctcacatgttgaaatgtattagcttgtgatattgtgcagaagtaaggcttgatgaagaaatggaagccatgggaaaggaaatggtcacacattgtggaggactaccattagctgttaaagcgttgggaggcttgttagctaataaacatactgttcctgagtggaaaagagtttttgacaatattggatctcaaatagtaggaggatcgtggttagatgacaacagtctcaattcggtttaccgaatattgtctctgagttatgaagatttgccaacgcatttaaagcattgcttccttaacctagcccatttccccgaagattccgagatatctacgtatagtttgttctattactgggctgcagaagggatttacgatggatcaaccatcgaagatagtggagaatactacctagaagagctagtgaggagaaatttggttattgcagacgacaactatttgagttggcaatctaaatattgtcaaatgcatgacatgatgagagaagtatgtttatctaaagccaaagaagagaacttcctacaaattatcatagaccctacttgcacctctaccatcaatgctcaatctcctagtagatctcgcagactcagcatacatagtggtaaagcctttcatatattgggacacaaaaacaagacaaaggtgagatctcttatagttccgagattcgaggaagactattggatacgatcagcttcagtcttccacaacttaacattgctcagggtgttggatctttcttgggtaaagtttgaaggagggaagttaccttgtagcattggagggctcatccacttgagatacttgagtttatacgaggctaaggtatctcatctaccttctactatgcggaacctaaagcttctgctctatttgaacttacgtgttgataccgaggaaccgattcacgtgccaaatgttttgaaagagatgatacagttgaggtacctttccctacctcttaaaatggatgataaaaccaagttggaattgggtgatctagtgaacctggagtacttgtatggtttctcaacgcaacacagtagtgtgacagacctcctccgtatgactaagctccggtatctcgctgtatctttgagcgaaaggtgcaattttgaaactctatcgtcatctctccgcgaattgcgaaacctcgagacgcttaatttccttttttcgctcgaaacatatatggttgattatatgggagagtttgttctggatcattttattcatctaaaacagttgggattggcagtacgtatgtcaaagattcctgatcaacatcaattccctccccaccttgtacacttatttctaatttattgcggcatggaagaggatccaatgccaattctagaaaagttgcttcatttgaagtcggttcgtttagcacgtaaggcattcctagggagcagaatggtgtgctcaaaaggcggatttcctcaattatgtgttatagaaatatctaaagaatcagagttggaagagtggatagtagaagaagggtcgatgccatgtcttcgtactttgactatagatgattgcaaaaagttgaaggaacttccagatggactcaagtacataacatccttaaaggaactgaagattgaaggaatgaagagggagtggaaggagaaactggtaccaggtggagaagattactacaaagtccaacacattcccgatgttcaatttatcaactgtgaccagtagcaggtaaaaaataaattgtatagtgttcactttgtttttttctgttgttgttggattcgtgtgaaagtcatgtggacagtctcaactattatacattgttctaacatcgatcatctttgaaataagatgcaggaaagaccaagaagcgagccaaattctcttatattgggagatatagacgctgcttcaacagagtcatctgctgatcaacaggtttttccgaagaatatctggtattgcttatgaagaatacagattctcaagtattaacgattatgtttccagtcttggagctctcgctttttcagtgcatcgttatgttgtgcggctcagaactatattatagaaacaatgcttatattgttgtttgtttttgatgtggatgcatggaacatgcttgagaactcttttacaaaatggagaaacgaaacttgtaaaatttggatattttatgtttgttgtaaaatttggatattttgtgtttgtgtaaaatttggatattatatgttttgctttctcgtttgtgatttaacacagttcgttttgtaagctttatttacagtttacaccatcaaatcttgtc

SEQ ID NO: 249 - DNA, 2931 bp, Arabidopsis thaliana
  source 1..2931: mol_type = genomic DNA
tttctcttcttttttttccctcacttctccaacaaactcgatttcccgatttcgtcgcctcttctcgtctctccgctctcctcgccgcgagtctgtttcgccgccgtctatctcccaattccggtacatcctaaaccatttccccttttaatccaacctgtgttgatttctaatcgcgattaatctcagttaggtttaattgcttgatctcagttgaaattagggcgtaatctcattactaaatgtagcaaaaatcgacaatatagtctcgtctctctgttatagcaatcaatttgtgagattctgaattttggcagaatcctaattctgaagtttggctaatatagaacctgtaattgtgttttttcatttatgagatgttttattaactttgttagtcacaaattgatttcatgtgtataatgttcattatttcgattttgttctcgtatgcgatattacgttcttggctgtgatatctgaagtaaagctgttgtaatctaagtttttcttctcttgattttaaacagtgaccgttgttgtttagtgaatcgatgatttacactgctatcgacaatttttacctatccgacgagcagctgaaggcttcaccttcgaggaaagatgggatagatgaaacaactgaaatctctcttagaatctatggatgtgatctcatccaagagggtggaatattgctcaaactgtatcctttttcttggtctaattattaagcaagactcaaatgttacgtagctgtgattttcttaacttagattgtttattttagaccacaggcagttatggctactgggcaggttctgtttcagcgattctattgcaagaagtctttggctaaatttgatgtcaaggtaaattattttgtttctttcttctagttttgtgtgtttatgaaagtatgataattctttaggagtgtatatactcctgcctatgaccataatgatttgatatgtagtttaatttttacagatagttgctgccagctgtgtatggcttgcatcaaaactggaagaaaaccctaaaaaagctagacaggtcatcatcgtattccacaggatggagtgtcgcagggagaacttgccattagaacatctggatatgtatgccaaggttagtttgcaattgcatttgtcatattgaatgttttttttcgtatattttgtttctactcatgggatagctttatttggaagtacttttatgggatctcatcttttttcctacttgttaaatatctgcagaagttctctgagttgaaagttgaattaagcagaactgagagacatatactgaaagagatgggttttgtttgtcatgttgaacatcctcacaagttcatatcaaactaccttgccacattagaaacacctccagaattgaggcaagaagcttggaatttggccaatgataggtaatctctattctcaaaatcctaatatggatattatttcatatgatttcctaatagttagctacacatcatagtgttgataggttttagagttgatgtttatcctgaagcttggcatttctcctgttctagtttgattttgagtatgtttgttatactttctcaatatctgataattcctttatgattttatcttaatctcatgatatgtctataatgcagtctgcgtacaaccctctgtgtaaggttcagaagtgaggttgtggcttgtggggtagtgtatgctgctgcccgtaggtttcaagtaccactccctgagaatccgccgtggtggaaagcatttgatgcagataaatctagtattgacgaagtgtgtagagttcttgctcatttatacagtcttccaaaggctcagtatatctctgtttgcaaggatgggaagccatttacattttctagcagatccgggaattctcaaggtcaatcagcgacaaaggtgaggtagatcgctttcttggttttgtaatttttgtgaaaacatgagattattgtccatattactgctattatagactcttaaagttgagtgcgtttcttacacagtagtaaacagagtttctaccaccacattgcatgttatatagtattgaaaaagggctgtctactttattatttcggcttgggaaaatctgcaatccaagtgcattttctatgtctgtaatcagagctaggtttgaagtgcttttaacactgttacaggatctgttgccgggagcaggcgaggctgttgatactaaatgtactgcaggatcagctaataacgacttgaaggatggaatggttactacaccacacgaaaaggctacagattccaagaaaagtggtaccgagtcaaactctcagccaattgtaggagactcaagctatgaaagaagtaaagtaggagatagagaaagagagagtgatagagagaaggaacgaggtagagagagggacaggggtaggtctcacagaggcagagattctgacagagacagtgatagggagagagacaaactcaaagatcgaagtcatcatcggtcaagagacagattgaaggattcaggtggacattcagataaatcaaggcatcattcttctcgggaccgtgactaccgcgactcatcgaaagaccgtcgtaggcaccattaagccaatcttcttgtcatctacatccccttgagcctacttgatgttaagacagtatagtgttgtattgtgttaagagtcaaaacccatgtgtacttaatcacatgctaagatcacgttggttcgacatataaaatcgagaaagtctgatatgtttctaatttggaattttgtgaaaagtgccttaaactttggaaaagtggttttttgacttttgacttgtgagttgttgtgaccgagcagagaggagaataatagtatccaaatctgacttgtggcacatgatggtaggcttaaagcacgttcaa

SEQ ID NO: 250 - DNA, 2681 bp, Brassica rapa
  source 1..2681: mol_type = genomic DNA
gagaacgattcgggaagtggcagttcaaatcttgtgttgcagctggtaatggcttttgcctcttcctcatcgagtattgttttaagcaaatgtgaattcgatgtcttttctttccatggtgcagacgtacgtaagaattttttgtcccacgtgcttatcgagctcaaatcaaagggcatagatgttttcattgacaacgatatccgccgatcgaaaagtataggaccttttctaattgacgcgatcaaggggagccgggtcgctatagtactgttatctgaagattatgcctcctcaacttggtgcttgaatgagcttgtggaaattatgaaatgtagaagggagttcggtcaaaccgttatgcccatcttttaccaggtcgacccatcggatgtaaagaaacaaacaggcgaattcggaaaggtgtttcagaaaatatgcaaggggaaaacagaggaaaagattcgtcgctggaaagaggcactcactgaagttgcgaacatcgctggtttccatagtagcaattggaagtctgaggccgaaatgatagagaaaattgcaaccaagatctccaacaaactaaatctgtcagtcccgtgttcgtattgcgacggcttagtaggaatagaaagtcacatgacagagatgcgaagcttgctttctctcgattgtgacgaagtgcggaaggttgggattctaggtatggcgggcatcggaaaaacaactatagctagatccctgtacaacaggcattgccaaaattttcagcgtttcgatggttgctgttttctttcaaacgagattgacgaattgaagcttcaaggtatcgatcagctccaacagaaactactgataaagttattggacgatgagacccttgaagtcggcgcctcgctcggagcacacaaagtactaaaggaccgcctgttaaataaaaagttgttcattgtgcttgataacgttgacaataaacaaatcagtctcctaataggggaggcgggtaagcagctgtatcgagatggcagccggattatcataacaacaagagacaaaaagttattggataaagtcgtagacggaacttacgtggttcctaggcttaacgggcgtgaagctctcgagcttttctgctcgaaagcatttggtaatcattatcccaccgaagagtttgtcgatctgtccaacgacttcgtatgctacgcaaaaggcttaccattggcgcttaagctcctaggaaaagggctgttaacacacgatattaattattggaagaaaaagttggaatttcttcaagtgaacccggacaaagagctccagaaggaactaaaatcatcgtacaaggctctggatgacgatcaaaaaagtgttttcttagacatcgcctgttttttccgcagcgagaaggcagattttgtctcttccatattgaaatcagacgatattgacgcgaaggatgtaatgcgagaacttgaggaaaaatgcctcgtgatgatctcgtatgaccggatagagatgcatgatctactgcacgctatgggtaaggaaattggcaaagagaagagtatcagaaaagccggagaaaggcgtcgcttaagcaattgtgagttgcttctcgacatactatctctgttattcgcaaactccgggtcagaatgcttgaagggtgattttaaagcgcttaatgagattaaggctatcaaaggcttccctgccgcattttcgatgctcggagacgatccctgtggggacggtgatttcctaaagtttcatggcagtcactgcagcactcagggagacaaccgagttgtcaccgatcatgaattccaagcgtctaaaatagtagggccatttccgattgctgtgacaaatctgttagacttgatgcggcttgatctccacaacaagctacctggtaaattcgaccccaaggagctgaaagatttatccttgagatggaatcatatcaaggacgttataccaccggaaattggcgagcttgaaaggctccgtcacctagatctgggatttaactcattcaaaggggagatccctaaggaattagccgcattgcccgagcttcgcgcgaaaaatctcgaagagctagacctggaaggtcgaataccagctgagtgtggctcgttacagaacttgcggcatcttgatgccggaaataaccacctcgtcgggaatactagagactgcattaggtttgatggtctattcaagggctttaaaatcaagagtctgaaaaacttaatattgagcggatgtattaaggcaaaagacttccatatcatatctgaagagattgtataccttcacctcgaaaagtttatctgcaatataccgttcgcgattgctcatatccacaaactaatatttctgaacttagatcataatcaattcttggggattcctgacgccttttataagcttaaattcctcaaggagatgtacatcgaaggtaaatccggcgtggagtcactacccacccacaaggttctggaagtctcggatgcagactttgcggtatggtaacgccctagacgatttctacctcctttgatctgttaaatctctcggactgacgaaagagaactttcttcaccactaatctatatttctccttaatcaaaaaaaaaaaaaaaaaaaaaaaaaaaaaaaaaaaaaaaaaaaaaaaa

SEQ ID NO: 251 - DNA, 5238 bp, Capsicum annuum
  source 1..5238: mol_type = genomic DNA
atggaaatcgtaactgctattttgagcccagtcgcagaacacttgatgatactgccagttgcgcgacagattggatatttgttttactataggcgcaacatcaggtctttggaaaatgaaaataagaagctggagggtatcagaagcggggtgcagcacagaaaggatgctgaatggagaaacttacaagtcatgccaccccatgtcgagaattggttaaaggatgttaatgaaactactgctgaggtggcggttttactacgacgtagagctgaggttgaaagaggttgcttctacggttggtgtccaaacttgaagtcacgtcactcgctgagcaggaaagctaagaaaattgaacaggctatgattggtcttcaagatgaaggcacacgttatgctccttcctcctgtccagcaccacttgcagttacagtgatacacagtgatgagtttgactctagaaaacagaaggaggaagaggtcatgacagctttgaaagatgaggggatcactattgttgggatatgtggtatgggtggtgttggtaaaacaacactggctgagaaagtaagagcaagggcaaaacaagaaaggttgtttgattatgttgttgtgctaactatcagtcaacaacaaccagacattaaaaaaatacagcgcgagatcgccgaaggagtcggtctatcattagagggggacgatttgttggagcgtggagatcggctgcgttcaaggttaatgcagaaggacagtcgcgtccttgtaattttggatgatgtttggaagaaggttgatctaaagagggttggaattcccagtggtagcgatcgcaactactggtgcaaagtgatattgacgacgcgtctccgagatgtttgtgacgatatggaggctaaaaagaaagtacatgttgaaatcttatgtgaaaatgaagcatggctcctttttaggcagaaagccggtaattcagctgatgatctctctcttcctgatatagcagaagccgttgccaaagaatgcaaggggctgccacttgcaattgttactgttgcaggagcactaaagggtaaaaccaagcgttcatgggaggatgcccttttagaattaaaaaaagcagcaccaagaaatattcgaggagtgcttgcagatgtgtatcaacctctgaagataagctataatcacttagggagtgatgaagccaaggatgcctttttgctttgttccttgtttgaggaagatagtaatatttggactgaagaattacttagatacggaatggggcttggcatcttttcggaactcgaaaatttagaatgtgcaagaaatagggtgtctaatctgttagaaacattgaaaaattgtttcttgttatcccaagttccaggcaaagattatgtcaaaatgcatgatgtggtccgggacatggctatacatattgcatctgagggtaaccatatttttttggtgagccacaatgtgaactcaaaagagttcccaagaaaagactcttacaagcaatacagtcatatgtcaattgttgcaaataaatttgatgcgcgtcccagaccaatatcttgcccacgattgaagcttctgatgttaaaactccgtttcgaagagggtttcaaattacaggatgatttttttgatggaatgagtgaactcagtgtcataaaactgagtggatatgatcgaaactccattctgccctttccatcatccattcagaggttgtcaaatctgagcacgctttggctgagtaatctaaggttggatgacgtgtccattattggggaacttgtcactttagaaattctcagcatcagaggttctgacttacaggagcttccagtggagatcggaaacttggccaatctaactatgttagagtattggaatactggttacagaaaccgtatgaggatttcaccaggggtcttatcaagactagttcgattggaggaactacatatggtgggagtagaagattgtagttactccaccttgagggagctggaatcgttatcgagattgactgcactgacattagatggatgttccaaagatgtgatttacagtaacttgggcctttcctccaagttgacacggtacgctcttaaaatgggtagacactacacgtttacttcattcatgcaaacttacaacaaggctatctatctagacgtcaccaagggcaccccattgggtgattggatccgcctcctgttgaggaatagcgaatgtgtaagttcaagcggaaaggggtccaagaatgtagtgttcgagttgcagaatgtgaaagatctcaggctgtctttttgtgattcattgaatatccactgtcagaataatattccattccccaaacttgaaaggctgaaagtaaatgggtgtgatcatctacggcatcttttttgtgtgtccttggcttgccctgatgaggggacctctcgaaggacacacatcagacctgacgtaatcaagttccccaatttatattacttggaactgggatttctgaaatgcttcacacactttttcagtgacaccgttgagggcattgagttccctctgttacggaaaatgcatttctggagtttacaaaagttccaaaatttctggcctagagtcaacaatgctatcaccgactcaaatcctctttttaatgaaaaggtttcttgtcccaacctggaattgctacgactctgtgaggccaacagcttaactgctctatgctctcaccaacttccaactgcctacttcagcaaacttgtaaccttgaatgtacttaggtgtggaaaactgagaaacttgatgtctccatcagtggccagaggtcttctgaatctccgaatattactattagaagactgtgaatcaatggaagaagtgatcacagaagaggaacaacaaggagatgaaatcatgtgtaatgaacccttatttccccaattggaagagctgggacttgaaaatctgccaaatctgaggcatttcattttgacaaagcaagctcttgaatttccattcctcagagaagtgcagattcgtaactgccctgaaacgaagatatttgtccaacagagatctgtcagtacatcaagtctcaaaagtgtgaacaatgatgatgagttgaaagttgttgatctcaacaaagcgatgtttaattctaaggtttcttgtcccaacctggaagtgctacgactctataaggctaacagcataagtgctctatgctctcaccaacttccaactgcctacttcagcaaacttaaggaactaggagtagggaattgtggaaaattgagacacttgatgtctccatcagtggccagaggtcttctgaatctccgaaaactatggataggagaatgccaatcaatggaagaagtgatcacagaagaggaacaacaaggagatgaaatcatgtgtaatgaacccttatttccccaattggaagagctgggacttgaaaatctgccaaatctgaggcatttcattttgacaaagcaagctcttgaatttccattcctcagagaagtgctgattcgtaactgccctgaaacgaagatatttgtccaacagagatctgtcagtacatcaagtctcaaaagtgtgaacaatgatgatgagttgaaagttgttgatctcaacaaagcgatgtttaattctaaggtttcttgtcccaacctggaagtgctactactctataaggctaacagcataagtgctctatgctctcaccaacttccaactgcctacttcagcaaacttaaggaactaggagtatggaattgtggaaaattgagacacttgatgtctccatcagtggccagaggtcttctgaatctccgaaaactatggatacgagaatgccaatcaatggaagaagtgatcacagaagaggaacaacaaggagatgaaatcatgtgtaatgaacccttatttccccaattggaagagctgggacttgaaaatctgccaaatctgaggcatttcattttgacaaagcaagctcttgaatttccattcctcagagaagtgctgattcgtaactgccctgaaacgaagatatttgtccaacagagatctgtcagtacatcaagtctcaaaagtgtgaacaatgatgatgagttgaaagttgttgatctcaacaaagcgatgtttaattctaaggtttcttgtcccaacctggaagtgctactactctataaggctaacagcataagtgctctatgctctcaccaacttccaactgcctacttcagcaaacttaaggaactaggagtatggaattgtggaaaattgagacacttgatgtctccatcagtggccagaggtcttctgaatctccgaaaactatggatacgagaatgccaatcaatggaagaagtgatcacagaagaggaacaacaaggagatgaaatcatgtgtaatgaacccttatttccccaattggaagagctgggacttgaaaatctgccaaatctgaggcatttcattttgacaaagcaagctcttgaatttccattcctcagagaagtgctgattcgtaactgccctgaaacgaagatatttgtccaacagagatctgtcagtacatcaagtctcaaaagtgtgaacaatgatgatgagttgaaagttgttgatctcaacaaagcgatgtttaattctaaggtttcttgtcccaacctggaaaagctatatatctattcggacataactgctctatactctcaccaacttccaactacctacttcagcaaacttgggacattgaaagtagaaaattgtggaaaattgagacacttgatatctccatcagtggccagaggtcttctgaatctccgaaaactacggataggagaatgccaatcaatggaagaagtgatcacagaagaggaacaacaaggagatgaaatcatgtgtaatgaacccttatttccccaattggaaaagctgaaacttgaaaatctgccaaagctgaggcatttcattttgacgaagcaagctcttgaatttccattcctcaaattagtggtgattcgtaaatgccctgaaatgaagatatttgtccaacatggatatgtgagtacaccaagtcttgaaattgtgaacgatgatgatgaggtaaaagtagatgatttgaacgaatggatacatcagaggttcaattctaaggaagaagatggaagtgaatctgaatcttctcagggagaagattggaatcgaatctga

SEQ ID NO: 252 - DNA, 682 bp, Arabidopsis thaliana
  source 1..682: mol_type = genomic DNA
tacatgtatatatattaatgttatgctattttcgttatgtaaccaaacaaaagagcttttgagttttggtcgtacaaaaaaaaagaaagggaaaatgaagataggacctgtagggaagcatgatgctagaagcactacaattgtaaactgggacgaaggatctcacgatggcttcatctctcagatttttctatctcatggcgtcgctggaattatgtctatccaattccagttcgtgatggacggaaaactcgttttatccgatcgtcacggtccattttccggcaacatgtttgacgttatagagctcaactatccgcatgagtacataactggaatcagtggagagtattacaagtatgaagccaacaatcctcacatgaggtctctcaaattcaataccaacactagcgagtacggtccttttggcacctccggttcgagcaacgacaaatttgcttttaaactcgggaaatctcctcagttcggcggtttccatgggacttatgatgcctcgggactacagtacattggtgtttatctccgcccaaaaacagttctacccaaaatagatacgggcaatgcagaggaaacagagtcaaaaattgtactgggctgaaagtgtttgtatacgactctattctgctgattgtacattcttaattatgaaaattcttctatg

SEQ ID NO: 253 - DNA, 3741 bp, Solanum peruvianum
  source 1..3741: mol_type = genomic DNA
atggctgaaaatgaaattgaggaaatgttagagcacctgagaaggatcaagagtggaggtgatctggattggctcgacatattgcgaattgaggaacttgaaatggtgctaagagtttttagaacctttacaaagtataatgatgttcttttgcctgattccttagtcgaactcacaaagagggccaaattgattggggaaatacttcaccggttgtttggtaggattccacataaatgtaaaactaaccttaatctagaaaggctagaatcacatttgttggaattctttcaaggtaatacggcaagtttaagtcacaattatgagttgaataattttgatctgtcgaaatatatggattgtctggaaaattttctaaatgatgtactgatgatgttcttgcaaaaggataggttcttccattccagagaacaacttgcaaaacatcgatcaataaaggaactgaaaattgttcaaaagaaaataagatttttgaaatacatatatgccccagagataaatggttatgtcgactatgagaagcaggaatgtttggagaatcgaattcagttcatgactaacactgtgggacaatattgtttggcagtattagattatgtcactgagggtaaacttaatgaagaaaatgacaactttagtaaacctccttacctattatcattgattgtgttagtggagctggaaatgaagaagatttttcatggtgaagtaaaggcttcaaagtttactcaatcaaaaactttcaaggacaagaaattaccaaaaggattttcacatcatctccacaatctgttgatgtatctcagaaacaaaaagctcgagaattttcctaataatatcgctgctcaaaatattgatgtggcaatagagttcttgttggttttccttgatgctgatgtgtcaaatcatgttattaatggtaactggttgaaagaggtcttgttaaaagttggagctatagcgggtgatattctatatgtaattcaaaagcttcttcctagatcaataaacaaagatgaaactagcaacataagtctttgctcaatacagatattggagaagactaaagatctgaaggcacaagttgagacgtactacaaatccttaaaatttactccatctcagttccccacctttggtggattgagctttctgaattctcttttaaggaaactgaatgagatgtcgacatctaagtccggattaggtttcctgatgaaacctcttttagggaatttggagaaagagctatcatctcttacatccattttagagaaggagctctcatccattttccgtgatgtcgtgcaccatgaacataacattcctaaagatcttcagaggcgtaccatcaatttgtcatatgaggctgaggttgctattgattctattcttgctcagtataatgcttttttgcatattttttgctcacttcctacaattgtaaaagagatcaagcaaattaatgcagaggtgactgagatgtggtcagcggacattcctcttaatcctcactatgtggctgctccattaaaacatctgccggatcgacatagcaatcttgtaactgatgaggaggtagtgggttttgagaataaagcagaagaactaattgattatctgattagaggtacaaatgagctagacgttgtcccaattgtaggcatgggaggacaagggaaaacgacaattgctagaaagttgtacaataatgacattattgtttctcgctttgatgttcgagcatggtgcatcatttctcaaacgtataatcggagagagttattacaagatattttcagtcaagttacaggttccgacgacaatggagctacggttgatgttcttgccgacatgttgaggagaaaattaatgggaaagagatatctcattgtattggatgatatgtgggattgtatggtatgggatgacttaaggctttcttttccagatgatggaattagaagcagaatagtcgtaacaactcgacttgaagaagtgggtaagcaagtcaagtaccatactgatccttattctcttccattcctcacaacagaagagagttgccaattgttgcagaaaaaagtgtttcaaaaggaagattgcccgcctgaactacaagatgtgagtcaagcagtagcagaaaaatgcaaaggactgcccctagtggttgtcttggtagctggaataatcaaaaaaaggaaaatggaagaatcttggtggaatgaggtgaaagatgctttatttgactatcttgacagtgagttcgaagaatacagtctggcaactatgcagttgagttttgataacttaccccactgtttaaagccttgtcttctttatatgggaatgttttcggaggacgcaagaattccagcatctacattgataagtttatggattgctgaaggattcgtggagaacactgaatctgggagattaatggaagaggaagctgaaggttacttgatggatctcattagcagtaacttggtaatgctttcaaagagaacttataagggtagagtcaaatactgtcaggttcatgatgttgtgcatcacttttgcttggaaaagagtagagaagcaaagtttatgcttgcagtgaagggtcaatatatccattttcaaccttcggattggaagggaactcgagtgagcttcagttttagtgaagagctttccaagtttgcatctctggtctccaaaacacagaagcctttccatcaacacttgaggtcattgataacgaccaatcgagcaaaatctattaatgatattttctcctgtcagattagtgaattgcgacttcttaaagtcttggatttgagttcttatattgtggagtttttgtcgttagctacattcaaaccactaaatcagctgaagtacctcgcagttcaggcttttgaattctattttgatccaggatcacatcttccccatatagaaactttcattgtaatgaatcttccttattatgatatattgttaccagtgtctttttgggaaatgaaaaaattaaggcatgctcattttggtaaggctgaatttgacaagcaggggctctctgaaggatcctctaaattggaaaatttgaggatattaaagaatattgttggatttgatagggtggatgtgttatcaaggaggtgtcctaatcttcaacaacttcaaatcacatattttgggaataatgaagagcctttttgtcccaaattggagaatcttacccagcttcaacaacttcaactttcctttgcgcgtccccgcactctatccgggttacagttgccttcaaatttaaataagttggtacttgaaggaattcatataggatgtgttattcccttcattgcgggactaccaagcctggaatatctccagttacatgatgtgtgttttcctcaatcagaagagtggtgccttggagatatcacgttccataaacttaagttgttgaaactggtaaagttaaatatatcaaggtgggatgtctcagaggaatcatttccgttgcttgaaacactcgttataaagaagtgcattgacctagaggagattccacttagctttgctgatattccaacattggaacagattaaattgattgggtcctggaaagtatctctggaggattcagctgtgagaatgaaggaagaaatcaaagacactgaaggatgtgatcgtttacacctcgtcaaacaacgctcagattga

SEQ ID NO: 254 - DNA, 7158 bp, Nicotiana glutinosa
  source 1..7158: mol_type = genomic DNA
attttttcacatacagtttcttactcttttcagagaattaacgttgagtccatggcatcttcttcttcttcttctagatggagctatgatgttttcttaagttttagaggcgaagatactcgaaaaacgtttacaagtcacttatacgaagtcttgaatgataagggaataaaaacctttcaagatgataaaaggctagagtacggcgcaaccatcccaggtgaactctgtaaagctatagaagagtctcaatttgccattgttgttttctcagagaattatgcaacatcaaggtggtgtttgaatgaactagtgaagatcatggaatgcaaaactcgatttaagcaaactgttataccgatattctatgatgtggatccatcacatgttcggaaccaaaaggagagctttgcaaaagcctttgaagaacatgaaacaaagtataaggatgatgttgagggaatacaaagatggaggattgctttaaatgaagcggccaatctcaaaggctcctgtgataatcgtgacaagtgagttaaaaacatataagctgaatactttgcattcaaatgagttaaacataatcttaaataaatttttcaattttttggaataaattgatagttgattatatatgtttctatcagttaattacaaactcaataacattattacgtagataaaatttttattagttcttcaaagagtttgatttatgtgcacactctttgtatatatcacaatctttttacttttgtaggactgatgcagactgtattcgacagattgttgaccaaatctcatccaaattatgcaagatttctttatcttatttgcaaaacattgttggaatagatactcatttagagaaaatagaatccttactagagataggaatcaatggtgttcggattatggggatctggggaatggggggagtcggtaaaacaacaatagcaagagctatatttgatactcttttaggaagaatggatagttcctatcaatttgatggtgcttgtttccttaaggatattaaagaaaacaaacgtggaatgcattctttgcaaaatgcccttctctctgaacttttaagggaaaaagctaattacaataatgaggaggatggaaagcaccaaatggctagtagacttcgttcgaagaaggtcctaattgtgcttgatgatatagataataaagatcattatttggagtatttagcaggtgatcttgattggtttggtaatggtagtagaattattataacaactagagacaagcatttgatagagaagaatgatataatatatgaggtgactgcactacccgatcatgaatccattcaattgttcaaacaacatgctttcggaaaagaagttccaaatgagaattttgagaagctttcattagaggtagtaaattatgctaaaggccttcctttagccctcaaagtgtggggttctttgctgcataacctacgattaactgaatggaaaagtgctatagagcacatgaaaaataactcttattctggaattattgataagctcaaaataagttatgatggattagagcccaaacaacaagagatgtttttagatatagcatgcttcttgcgaggggaagaaaaagattacatcctacaaatccttgagagttgtcatattggagctgaatacgggttacgtattttaattgacaaatctcttgtgttcatctctgaatataatcaggttcaaatgcatgacttaatacaggatatgggtaaatatatagtgaattttcaaaaagatcccggagaacgtagcagattatggctcgccaaggaagtcgaagaagtgatgagcaacaacacagtaagtaagctaaataatgcaataatatttaatttctaattttatattctaaagacacatagggcagtcaattccagttatttgttcctcttgcttcatagtcttgacggtacatcattttagttgtttactttagttagtaggagatataaaagtaatattaattacctcattagtaaaaaaaaacattaattgcctaatttgtttagtagccgctttaatttacgttccctaattcgttttttcttatattttttagggatggattagtctagtagccacttaatctgtttgatccaatgtctttctttggattaacttgaaaattttatgacattatatataataactcaatcattcattcactttaccattattattttttatataaagttacaatttattggtactgtttcagttacaattactttccaacatggaaaacttataaactggactccaataaacttataagaaaaatgtaataatagaaaataaaattatataattaattacaaaaaagtatttttctgaagtaacatcagtatttcttaaaaagaatccaattaacattgtatcttaaactttggtattgtaaggcgtgagaaagtagtggccttatttcaatttgacgtgaagaatagaatgccttttaacgacataagggaagggggcaagaataagtttctattcagccgggctcgaagcagaaggtagaacgtaatatcttttgttggttcagctcatcaagctattacaaaagagtccgctcatattaacaaacggagtttatacgacatttgaaattatactttgtagactaatgatcttcttgttaccaggggaccatggcaatggaagcaatttgggtttcttcttattctagtactctacgctttagcaatcaggccgtgaaaaatatgaaaaggcttagggtatttaacatggggaggtcgtcgacacattatgccatcgattatctgcccaacaacttgcgttgttttgtttgcactaactatccttgggagtcatttccatctacatttgaactcaaaatgcttgttcacctccaactccgacacaattctctgcgtcatttatggacagaaacaaaggtacaatagcttgaattctattttgttgtcatttatttttctctctaactatctttgtcctttaatttggtgataatgaacaaatattattgttttttgttatgaaacaataaaagaagaagaacaatattgcagagaaagagggagatggaattcttattgaattttggggcgatttacaatggggtaagacccctctatttacaggggaaaaataacttagcctcaaaataaagctctttaaaagatagacattcactctaaatagaattctattataacacttttggcgtacttccttttttggctagaattatgatacatgtctttaaatgaacagaagttgcttttgtaatttatcaggacttatgttgaaacttatgaaaattgttattgtttatgttgtctaatactaaatataaaatacaataatattttatcgtaattttttaaaaatttgtcaaataatgcaaatgaaaaattaaattttttggtcctttaaaaatttgagaatgaaaaagtacgagttatacttcctaaaagtttgatagtgaataatatgtaaaatttaaagaatgactaatattggactaatactttaaaacaaataacttaatatacaaattatagcgagacattttcattcgttgtactgaatgcaagaaagaaaggaaaaaaaaactcatttataatatagtttgtcttctactattttaccttattgcttcaaatttgtattttatcgattttgctatatcttatgatttttttcacggtcaatattcttcttacaagaataaattttatatacctcaagtgttttgtcaatttgataaataatttttcttatatgatgaacttgtaaaataatagaattggattcttttgctaattagttaattcaacgacttaattatttattctcaacattaaaggaaataatttagtttttattaattcaaactcttagtatttgctcattctaattttcagtccaataagaattcaattttcaaatagtaagaaaagtcatatattttgaattttatgttttccgaagcattgtttgtttgtttaactctacgggagttttctaactcacattttgtataataaaattttttgagtagtagttcagtacaactctaatattaatgggctttaaataaggaaatatatattacgtaaaaatttaaatcattttaaagttctttcctaccaagtaaataagggaaaatttaataacaaaaatttagttgattttaaaatcctaaatattagaaaattaacttaaaatataatttcgtctagtgtaaaatttatttttaaagggtaaaaaagacgaacgacattaagagcctttgtaattttaatatagtataaatataaataatttacctttattcagtttcttaacaagtaattttccatatataaaaaataaatttctatattcacacaaaaataatgtgttggccctcgtaattcaaatactatcattcatttcttgtcgagggagtagtaaatacttttaggaaagttagcaataagtaatcaagaaatcaagaaaacagaggtcatttgatgcccacaaatacaaatgaaaaaacaaaacaaatgttacgaaacaataaaagaacaagaatagcctcaaagtaaaactctctgatagacatttactctaaatagaattctatttataacaatcaaaaagtttctacatttatagatagctccactagccaaatattttattattggaatcagcaaaataggttgtttctttttttattctcattctgtctgtgttctaaacagcatttgccgtctctacggaggatagatctcagctggtctaaaagattgacgcgaacaccagatttcacggggatgccaaatttggagtatgtgaatttgtatcaatgtagtaatcttgaagaagttcaccattccctgggatgttgcagcaaagtcattggtttatatttgaatgattgtaaaagccttaagaggtttccatgtgttaacgtggaatctcttgaatatctgggtctaagaagttgcgatagtttagagaaattgccagaaatctacgggagaatgaagccggagatacagattcacatgcaaggctctgggataagggaactaccatcatctatttttcagtacaaaactcatgttaccaagctattgttgtggaatatgaaaaaccttgtagctcttccaagcagcatatgtaggttgaaaagtttggttagtctgagtgtgtcgggttgctcaaaacttgaaagcttgccagaagagataggggatttagacaacttacgggtgtttgatgccagtgatactctaattttacgacctccgtcttccatcatacgcttgaacaaacttataatcttgatgtttcgaggcttcaaagatggagtgcactttgagttccctcctgtggctgaaggattacactcattggaatatctgaatctcagttactgcaatctaatagatggaggacttccggaagagattggatccttatcctctttgaaaaagttggatctcagtagaaataattttgagcatttgccttcaagtatagcccaacttggtgctcttcaatccttagacttaaaagattgccagaggcttacacagctaccagaacttcccccagaattaaatgaattgcatgtagattgtcatatggctctgaaatttatccattatttagtaacaaagagaaagaaactacatagagtgaaacttgatgatgcacacaatgatactatgtacaatttgtttgcatataccatgtttcagaatatctcttccatgaggcatgacatctctgcttcagattccttgtcactaacagtatttaccggtcaaccgtatcctgaaaagatcccgagttggttccaccatcagggttgggatagtagtgtatcagtcaatttgcctgaaaattggtatatacctgataaattcttgggatttgctgtatgttactctcgtagcttaattgacacaacagctcacttgattcccgtatgtgatgacaagatgtcgcgcatgacccagaaacttgccttatcagaatgtgatacagaatcatccaactattcagaatgggatatacattttttctttgtaccttttgctggcttatgggatacatctaaggcaaatggaaaaacaccaaatgattatgggattattaggctatctttttctggagaagagaagatgtatggacttcgtttgttgtataaagaaggaccagaggttaatgccttgttacaaatgagggaaaatagcaatgaaccaacagaacattccactgggataaggaggactcaatataacaacagaacttccttttatgtaagtctctacttctattagctacaaagtcttcttccaaaatcaatactccatccgttccagtttatgtgaacctattttttgttcgtccattctaaaaagaatgacccctttctaaatttggaaataattttggttaaacttataattctaccattaacgagaagcttttataaccacacaaatattctggggccctttttgaattgtttaggaccataaattccaaaagtcctcattttttcttaaactccgtgcccaatcaaacaagttcacgtaaattggaacggagggaatatattttttcttctcattcttttcccctatttacaggagctcatcaatgggtgatgtacatatcaacaacgagttttaaaggattccaacaagtataactttttatgctcaaatcagctccttgtattgtggagaaagctgagtacgagatgaagttgacgtccgttatcctttatgatctctctgttctttgtgttaacttgcctacttcatcagatgaataacagaagcccgttcctctcattctcaacactgtttgcacgtctgttgttacttgttaaaatggatcttgataaagtaataacatctctatattacttataagtggttttaacaagttcactcttttgcttttgcagttcaaatgggaacacaatgtatattgagaactagaacaatgacactgcatatatatatatatatgtatgtatgtaattctcgtcttttggactagaataccttgtttcattatgaaatgaattaacatcttcgcctttgctgac

SEQ ID NO: 255 - DNA, 9837 bp, Solanum lycopersicum
  source 1..9837: mol_type = genomic DNA
ggatccttctcatttttagattacaagttctatactcttgttctttatagaatatttcaattgtgaattgtaatagttgaaataagttctaagtttaataaaatttgaggaaataattcatcaattaacactcatattttctttctactattttcatcacatacatacttcaaagatatatcattttataatatcaattctaattagcatgagaacacgtgcaagagacacgtgttcaacaactaatattactaaaagtgggaacaaaaaaaattaaaatatcaaaatcatattttatttagttatttaaaggtaattttatttttattcatgatatagtgatgttcatattataatactattattgattactttcttttagggggtaaattgtatggcatggaaaaaaaatattttcagagatgatgattcttttatcattagaaaacttatattagattatttatacttgtatactcgggttagaagttttgtgttctatgagtttctttaatcatgtttgtaattatttcaaagtattgatatatttttataattttgttttactatgttattatataatattgtagagaaaatgatcaaatgccccctcaacgtataactggatttccaactacacacttaaactttacgagagtcctatcacccccctgaactatttaaaaatgaaataattatacccttaaaaaagtcataaccagatctattttcacgtgtttgacacgacatcaaattattattatttttagggataatgcccaagtaccccctcaacctatgcccgaaatttcagagacacacttatactatactaaggtcctattacccccctgaacttattttattaataattttttactcctttttagcctacgtggcactatcttgggggcccaacgatggttgactttttttttcaaactagtgccacgtaagctaaaaaggggtaaaaaaaattacttataaaataagttcaggggggtaataggaccttagtatagtataagtgtgtctctgggatttcgggcataggttgagagggtacttgtgcattttctcttatttttaccatcactagaacaccataagtccattattgggtctttgaggaagaaaagtgaataataatttatagctcgttcagagatatttgaattttgctcatttgatacctaaaattaactttaaaaaagtgagggggggaggtggggggttagaagacgaatattgtcattaatgatggtcaccgaagataaacaatgctctcaaggaagatgaggaggagcaacctatgatgtctgccacatcatcttctatggcgacaacaatttcaaatagggagagagattctacgatatttgatggattaactagattaatagctaaaattttgtagatataattgattgattgagatttgatattctattagtaaaaaaaatatttttttggttggtccaatcggagtcaaagtaaaacccatattgattttctcaaattaggtccaaagtatcctgaggtaatataaatatatgtaaatttatctcaattgattttggatgattggtaatcaagagttttatatgagttcgaaaatttattttgaatcagaaatagtcaatccggtgaagatattgatggcaacaagacttagaggtggtgaaagattgagagatttgttaataaggaaagggccaaaaataccctctaactttaatttattgattgactttatcccatccgttaaaatgaagttatttataccctcgcctttaacaaacttgtcatttctaccctccaaattaacggttgccctaaattgaccccaaatcccaatttcaatttaaattacccatttgaaattgatttcctcttttaaaccggacccaataaacttaataacattggtgaaacttcaaactttcttcccaattttgtcaaaaacagagattttacacaataatatacaactcaatatacataaaccaacaaaaatgaaaatgcaccattagaggaattgaatagctattgccatggtacaaatcgtttctacatagatgataccaaataaatgagagaacaccattacattatttggtgctgttttcttgtactccgacaacccacaacccttgagcgatcccaatggtgacaaacacaactgaagaacttcttgcagatgcacattatctccgggcaacgatgacgatcaaaaagcaagaggacgaaacccttctgcctcaatgtttcacctcttcttctgcaccatattttcttcgatattccctactttcaatcttttaatttttcgccattgatttgaaccaatagcccccaatatttcaattttttgatcttggaaaaccatgttggtaattggtagaagacagcatcgttcaaatcgatttgtgtcgattcgttggaatcagaggaaaagtagtaagaatggaacgtaccagttcgtcggaaccggaggaatattaataaaagagaagaaagtgaacgaagagagttatccttaattgagatgattctggtaacttttttgtgacgattctggtaacctttgatggagaaataagaagtcattgttcaagttattgagagagaaagaggagatgctttgttgttatttgtttactataatgggtcaggttggattgagtttgggtaataaatgatatggcaattttatttgaaattgggatgatttttattgatttgaggctttccctctaaagaagggtacatatgacaagtttttttcaacggtaaggatataaataacttttttttaatggtaagggtaaagttaaccagtaaatcaaagttgatgaagaagaaagattacaaataagaaaaataaataattgaaaatgcatatatttattgaaagagatattaaaaataaagttttagtaatagattttgatgttcactctccaaagagagtgaaatacactaactatgccagctaagcattcagggaggtaattatttcagttttaaatagtacagagggtaataggactcccgtgaagtttaattgtgtagttgaaaatccaaaaatacattgaggtgacattcaatcattttctaaatattaaaaatttaaagatccataaggggcttacaccctactcatggcttacgtcttgccttttactaagtaaattgtccaagagttgctcaagcatattagtggcctaaagcaaaaatcacttattaataatttttatataattgatttcttctagatttcaattgataataataccattgttattttaaattatttttcatgagatataatattccaaatatgtcaaatttcttttaataattccttcatttcatctaataattccttcatttcatgaaaagtttactttttatacaaataatattcaatattttttttaaaaaaatactccttataacctattattattaaatatgaaacccttaagttttggggtctaagacacatgtctttttttagcactgtcgagtcacctctaaaattgtctcgccttacgcgcgtgttcgttaaaacactgcgcagaatgattattataaaaggaagtgttatttgtagttttgatgatgtgacaaactcagagaccttgtaaaggtaccaggttctcaacatgagttttgatgatgtgatatactcaggaaccttgtaaaggtaccaggttcccaacatgaatagcctgttgactgccagccggagaaggtacagaatgggtgcacatttaccaatggcgtgagaaaagtcagaccttttcaacaaatggcaagagtttaaggaaagggacttgtctatacaatgtcactttcctaaacatcattccttagtttttgcaacttgaaaaagtactctcacgaacatttgcaaaggctatagaaaatccaagtgaagaattattcaaataacaactgaaaattcagaagcatatcgtgtagttgtttgagaatatattcttgtggtcttacattgtaaactgttcctaaatctataaaggaatcagtgtggtggtgttgaaattctaagttgtcttgaagggatagcttagtgggtagaataacttctacttatgcttatcaagcaaaagagttattgcttgatcgtgagattaaaaactttctctcacatttgtgtaactggttttacttttacttgcgaattttagtgaaacagttgtgaaaatcctgtgagacaggtcgtggttttactctcttaagcaaggaggtttccatgtaaaattattgtgttgtcaagctgcatttactttctgtttatactttgtgtgtcaagggacctggtccattgactgataagtagacgcataaattctaacagtaagatacttctcctttttctttaatacaagtaatgtaatttatctctaagaaaatataaaagttcaacaaatgaaagggcaagtatgaaaaaaataataatacaaacttacctcttcaattttaaacaatgattggtataaaaagatgctgccccacgttgtctctctctttcttttttatcgttcacatttttaggaaacttgggctacagcaaaagcaaaagtcattactatactcatttttttgtagctacttaaaaaagagaagaaaaaaatggctgaaattcttcttacatcagtaatcaatgaatctgtaaaaatagctggaaatctactgattcaagaaggaacacgtttattttggttgaaagaggacatcgattggctccagagagaaatgagacacattcgatcatatgtttgacaacgcaaaggcctaggaagttggaggtgattcaagggtcagaaacttattaaaagatattcaagaattggcaggtgatgtggaggacctcttagaacgtatagaactttaattacgtaatcaatttttgttgtttgattttatagatttagacaatatatatataattatttatcgttcaacaaagaagacgattgtgtattcgggttgttcatgaatttcaacttttactatttcattttgaattttttggttagtcatttctatcaatttgcttaggacacctgtgcggaattgttatactactccctttatttcatattacttgaatttgtgaggcaatgcctatatatattaagaaaaatattcaaggacataatttaaatcatgattctattattttcctttgtggaatcataaatataactttgtaagtagtttaatttatctcctaaagcgtacagaacttcaataaataaaaggacaaatatggaaagaatttcaaacatccttcttaaactttgaacaattcaattattatgaacaatgcaaaaacttcaaaaattcactttaatataaaataaaggtaatataatataacatgattttttttttaaaaaagaaaaacatatttgttacatatcactgttgggactcgtcctagggcaaaactctggcaaaacgcctcgagactgaactttgggtcttagttcggtaagaatcacgccctaaactgcagattgtacgtcctaagtacgcccaacacccaacgttcggggctcgactaacatatcttatacaaagtaattatgtgttaaaatctgtatagttaacatttttgaccctcatagttcttgaataaatgaatgatacttaataatttttaaatctgtagagataatagtaactcaaataattagttgtagtatcacatttttactattttataacaatgtaaagatgataatataatatgtaacatttctttcaaaacatatagcaaatttttactttttcttgcttattattgattttcttggttttgtcatttgtgtcaaaactatcctattttatttaactatttgaaaataattttattttgattcatgatatagtgatatttttattataataatattattgattattttcttttagggggtaaaaattttaacatcgatagggcgctcaaagcttacgccttgtacttaaagacgcccccttgacaagactgcagcgagtgattgtcatagaaaaaagaaatttctcctttttcattaatgtgcagctgccccacgttgtcactccccttcttctttatcatttccttcttgacattattaggagacttggccgtggactccatctaccactaaaaagctaaagccatcagtatactcattttttggtagctactgaaaaagagagaaaaaaaaatggctgaaattcttcttacatcagtaatcaataaatctgtagaaatagctggaaatttactgattcaagaaggaaagcgtttatattggttgaaagaggatatcgattggctccagagagaaatgagacacattcgatcttatgttgacaacgcaaaggccaaggaagctggaggtgattcaagggtcaaaaacttattgaaagatattcaagaattggcaggtgatgtggaggatctcttagatgacttccttccaaaaattcaacaatccaataagttcaattattgccttaagaggagttcttttgcagatgagtttgctatggagattgagaagataaagagaagggttgttgacattgaccgaataaggaaaacttacaacatcatagatacagataacaataatgatgattgtgttctgctggatcggagaagattattcctacatgctgatgaaacagagatcatcggtttggatgatgacttcaatatgctacaagccaaattacttaatcaagatttgcattatggagttgtttccatagttggcatgcccggtctggggaaaacaactcttgccaagaaactttataggctcattcgtgatcaatttgagtgttctggactggtctacgtttcacaacagccaagagcgagtgaaatcttacttgacattgccaaacaaattggactgacggaacagaaaatgaaggaaaatttggaggacaacctgcgatcactcttgaaaataaaaaggtatgttatcctcctagatgacatttgggatgtggaaatttgggatgatctgaaacttgtccttcctgaatgtgattcaaaagtcggcagtagaatgataatcacgtctcgaaatagtaatgtaggcagatacataggaggggaatcctccctccatgcattgcaacccctagaatccgagaaaagctttgaactctttaccaagaaaatctttaattttgatgataataatagttgggccaatgcttcacctgacttggtgaatattggtagaaatatagttgggagatgtggaggtataccgctagccatagtggtgactgcaggcatgttaagggcaagagaaagaacagaacatgcgtggaacagagtacttgagagtatgggccataaagttcaagatggatgtgctaaggtattggctctcagttacaatgatttacctattgcctcaaggccatgtttcttgtactttggcctttaccccgaggaccatgaaattcgtgcttttgatttgataaatatgtggattgctgagaagtttatagtagtaaatagtggtaataggcgagaggctgaggatttggcggaggacgtcctaaatgatttggtttctagaaacttgattcaacttgccaaaaggacatataatggaagaatttcaagttgtcgcatacatgacttgttacatagtttgtgtgtggacttggctaaggaaagtaacttctttcacaccgcgcatgatgcatttggtgatcccggcaatgttgctaggctccgaaggattacattctactctgacaatgtcatgattgagttcttccgttcaaatcctaagcttgagaagcttcgtgtacttttctgtttcgcaaaagacccttccatattttctcatatggcttattttgacttcaaattgttgcacacattggttgtagtcatgtctcaaagttttcaagcatatgtcactatcccaagcaaatttgggaacatgacttgcttacgctatctgagattggaggggaatatttgtggaaaactgccaaatagtattgtcaagctcacacgtctagagaccatagacattgatcgacgtagcctcattcaacctccttctggtgtttgggagtctaaacatttgagacatctttgttatagagattatggacaagcatgtaacagttgcttttctataagctcattttacccaaatatttactcattgcatcctaacaatctacaaaccttgatgtggatacctgataaattttttgaaccgaggttgttgcaccgattgatcaatttaagaaaactgggtatactgggagtgtccaattctaccgttaagatgttatcaatatttagccctgtgcttaaggcgctggaggttctgaagctcagtttttccagtgacccgagtgaacaaataaagttgtcatcgtatccacatattgctaagttgcatttgaatgttaacagaacaatggccttgaactctcaatcatttcctccaaatctcatcaagcttactctagcctactttagtgtagaccgttatatactggcagtacttaagacatttcccaaattaagaaaacttaaaatgttcatctgcaagtataatgaagaaaagatggatctctcgggcgaggcaaatggttatagctttccgcaacttgaagttttgcatattcatagcccgaatgggttgtctgaagtaacgtgcacggatgatgtcagtatgcccaaattgaaaaagctgttacttacaggattccattgccgaatcagtttatcggaacggcttaaaaagctgagtaaatgaacatctcaacaggtcagtttgctagtataactatttacgtacaggggtgcatcacagcaacgtgagtgtagtagtgttgtttcttgttgtggttgtttgttggttgttcagatctgaaagtgtgaagctcattagaacacgtctcatagtgatattaaatttacttttaaacaataaaggcgtgtaataagtcattgtaataattaaatcatgtaactgatttttcacgagagaaaatttatgtcattttcctttgtaaagataaagtagtcattggttccaattgtaagattaaatacttgaatacataatatcaggattttgaacacgataatcttacatagaaatcattaggggaacatacctgatgaggaagacatcttcacacacaaaaacgaaagtgttagtcgtaaattgatttctacctccttttcctaactttatgttaccacaatcgtcagcgatagaattattctagagaatatgtggttaactctagtgggtggagggaggaccaattcatagaggttgtgatttaatctgatacgtccatcaattaaccaatgtacggacgagatctattacttaataaatattatttatgatattacttggattacgactaaacttgggtcataagtaagaaataattaataataattcttacagtctcccacttggcccaataaccatatatcattaatatttaataaatattagttgcgcatacaatagatctcttctataatgtcaatcatgcataccacaatatgacaaactactaatgcgagttttgacggttgcacataaattttaagctacatacttccttccatatactactacattagcaacttatcatactaggttcataaggtataaaaacatataacattacggtccacaataatgcctcatataaactcatcttgtaatttctcaaaacaataatgtgtacaccattacgagaaacaagatgttcagaaacacataatttgagctc

SEQ ID NO: 256 - DNA, 3947 bp, Capsicum chacoense
  source 1..3947: mol_type = genomic DNA
tggtggtgcatttctgtcttcagctttgaatgttctctttgataggcttgctcctcatggtgatctgctcaacatgtttcagaagaataagaatgatgttcgactcttaaagaagctgaaaatgactttggtcggccttcaggttgtgttaagtgatgcagagaataagcaggcatcaaatcaacatgtgagccagtggcttaatgaacttcgaggtgctgtggacggtgctgaaaacttaatggaacaagtcaattatgaggctttgaggcttaaggtggaaggtcggcatcaaaatcttgcagaaacaaacaaccagcaagtaagtgacctcaaactgaacttgagtgatgattattttctcgacataaaggagaagttggaagaaaccattgaaacattggaggatttgcaaaagcaaatcggtgaccttggcttacagaagcatttagatttgggtaagaaactagaaactagaacaccttcaacttctttggtcgatgaatctaaaatccttggtagaatgattgaaaaagagagattgattgaccgtttattgtcaagtgattcaaatggagaaaatctgactgttgtccctattgttggaatggggggcgtgggcaagacaacacttgctaaaattgtttacaacgataagaaggtgaaagatcattttggcttgaaagcttggttttgtgtttcggaggcatatgatgctttcagaataacaaaaggattacttcaagaaattggatcattcgacttaaaggatgacaacaatcttaatcagctacaggtaaaattgaaggaaagcctaaagggaaaaagatttcttgttgtccttgatgacttgtggaatgatgactgtgatgagtgggatgacttgaaaaatctttttgtacaaggagctatgggaagtaagatccttgtgacgacacgtaaggaggatgttgccttgatgatgggtaatggggcaatcaatgtgaagactctgtctgatgaagtctcttgggatctattcaaacagcattcattaaaaaacagggatccggaggaacatccagaacttgaagaggttggaaagcaaattgcagacaagtgcaaaggattgcctttagctctaaaggcacttgctggtattttatgccgcaaatcagaggtgtacgagtggaaaaacgtcttaagaagtgaaatatgggagctgccaaggcgtaagaatggtatattaccagagttgatgatgagctacaatgatcttcctgcacatttgaagcgatgttttgctttttgtgcaatatatcccaaagattataaattttgcaaagagcaagttattcacctgtggattgctaatggtctggtacaacagttgcattctggtaaccaatactttaatgagttgagatcaagatcattgttcgaaagggtcccagagtcttctgaaagatacggagggaaattcttaatgcatgatcttgtcaatgatttggcccaaattgcatcttcaaaactttgtgtcaggttggaagagtgccaaggatctcatatattggaacaaagtcggcacacgtcgtattcaatggggagagatggtgactttgagaaattgaaaccgctctctaagtcagagcagctgaggacattgcttccaatctctatccagttcctttaccgccctaaactaagcaagagggtgctgcataacatattgccaagactaacttacttaagggcattatcattgtcatgttatgcgattgtggagcttccaaaagatttgtttatcaaatttaagctcctgagatttttggacctttctcggacagagattacaaaattgcccgattctatctgtgcgttgtataacttggagacacttctcctgtcatcttgtgatgatcttgaggagctaccgcttcagatggagaagttgatcaacttgcggcaccttgacatcagcaacacttctcgcttgaagatgccgctacatctgagcaagttgaaaagcctccaagtgctagtgggagccaagtttctactaggtggcccctgtggttggagaatggaagatttgggtgaagcacattacatgtatggatctctatcaattttagaattgcaaaatgtggttgatagaagggaagctcagaaggcgaagatgagggataagaagaagaatcatgttgagaagttatcgttggagtggagtggaagtgatgcggacaattcacaaaccgaaagagacatacttgatgagctacgtccacacacaaaaataaaagaagtcgaaatctccggatatagagggacacagtttccaaattggctagctgatgattcgtttcttaagctgctagtacaattgtctcttagcaactgcaaggactgtttttccttgccagcactaggacagcttccttgtttgaaattcctttccattagaaagatgcatcgaataacagaggtgatggaagaattctatggtagtccgtcctctgaaaagccttttaacactcttgagaagcttgaatttgcagagatgcctgagtggaagcagtggcacgtactagggaacggagagtttcctgcacttcgggacctttcaattgaagattgccccaagttggttggaaatttcctcgagaatctttgttctctgacgaaattgagaatctcaatatgtcctgaactcaatttggagacacccatccaactttcaagtctaaaatggtttgaagtttctggttcttttaaggctggatttatttttgatgaagctgaactgttcaccttaaatattttgaattgcaactctcttacctccttgcctactagcactctgccgagtacgttgaagacaatatggatatgtcgttgccggaaattgaaattggaggcaccagatagtagtaggatgatttctgacatgtttctggaggaattgagactggaggaatgtgattctgtatcatcaactgagttggtcccaagagcacgcactttgactgtgaagaggtgccaaaaccttactaggtttttgattcctaatgggactgaaagactcgatatttggggttgtgagaatcttgaaatattttcggtggcatgtgggacccagatgacgtttttgaatatccactcttgcgcaaagctgaagcggctgccagaatgtatgcaggaactccttccatctcttaaggaactgcatctgtggaattgtccagaaatagaatcctttcctgatggaggattgcccttcaatttacaactcctcgtgatcaactattgcgagaaactggtgaacagtcgaaaggagtggcgtctacagagactccattctctcagagagttgttcatccgccacgatggcagtgacgaagagattgttggtggtgagaattgggagttgcctttctctattcaaaggcttaccatagacaatctgaaaacattaagcagccaacttctcaaaagcctcacctctcttgaaactctagattttcgtaatttacctcaaattcggtcactgctagaacaagggcttccctcctctttttctaagctatatttatacagccatgatgagctccattcactacaaggtcttcagcacctcaattcggttcaaagtctattgatctggaattgccctaatctccaatctcttgcagaatcagcgttgccctcctccctctctaagttgaccatcagggattgccctaatctccaatcccttcccaaatcagcatttccctcctccctctctgagctgaccatcgagaattgccctaatctccaatcccttccagtaaaagggatgccctcttccctctctatactatctatttgcaaatgcccatttctcgaaccactcctagaatttgacaagggggagtactggccagaaattgctcatattcctgaaatatatatcggtcgcactatgt

SEQ ID NO: 257 - DNA, 18284 bp, Solanum tuberosum
  source 1..18284: mol_type = genomic DNA
tgcgcaattcttactgttttataccttttctccctctcttcctctccatcattttcagccttatggatattattgttatgttcctcatgagtatcaacatgcatattcttttctccaaattgttgttcatctcttacaatattattatcataaatttcaccaacattcgtatgatttcggccatttgcttctagaccttttatcgatttctccctttgtattttttctctcaatacaagttgccataagtatttcacaatttccttgttgaatggattttccaagcaaaaataagctccattttccaaagcgttcttggctaagagtctattgagtttatcacctacaactgcataattatattgagaagttaaaaattaaaattaaattatatcatacattatgagaatagttaatttcacacatatatttactgaattttatctgttatgacaacaactttgttatgaaacaatcatttatcatataactataactaaaaacaagattaacaatggatagatgtcgtctcttgacaatagattaacgataaattttatagctaattatatttttgtggtgtattaattgaaacaactgactttacccaatatttataacaagaagtgaaaaatagaattataaatacttaccaagagagattatatttaaggttacagcttgtgtcaagagttcaaaacaatgtaaatctgatgaattgacatcgattatcatcatgtcaatttttttcttttctttggagagcattgacattgccgcaggagtcgtaactgtcgtaactgtatatatccatacattttaaagttaaagttagtgaagaacatgaaaaaaatattatacacaaagttatcatttggatatgtttatttaatttctcattcaaattcaattatgaaatttcatattatgttgctatactttaatttatgaaataacacatattaatcaacttatatcgtaaacggtgtgtgtaatgacccgaaaggtcattttggtaatttttcgtggaaatgactattttgccctttcggtagttgccccgagtcccatgttttatggttgtaaagttagtttgaggaaaagttggtaaaaagttgagtttttgagaagttgagtttttatgagttaaagttggttaaaaagtgctttttcgagttatttggagtttcgggactcggattgaatttccgtcgattccggcaattttagaatgtcgaaacgggtctgtgtgaagttacggagttgaatttggagttgaaacgaagaattgaggtcctaagttgctaaagttgtgaaattgtgataaagagttgactttggtcaacatatgaggttccgaggctcggattgaaattccgaaagtaccgttggtttcgggaggcgattctaagtctagaatgagtcttggttgaatttttagacgctctgtttgagtttcgaattttttttgcgttaaactagtttcttggcatcttattgaatttcgggtcaaggagtcctcgaattcaaattccgacggttccattgagtccggaacgtcgaatttagtgggggtacatatttagtttgtgtgcacgagattccgaacgaatcccgagggtccaacggggacttaaactttggtgttattgttgtgtttcagctgcaatagcagtcctttttaagtcaaaaaacagtagccattttcccccaacttgaaaaatatccatttctacatttttagactttgagagctcgaaaataggtgatttcaagtgggttttcacaaggaattcattgggtaagttatttccaacttatatctttgatttccatcgattatttatggattttaacatcaaaatttgagatcccaactgaaaaatttgggggtttttgcctagtccgaatttaatagaaaatttgagtttgtgaactcatttcaactcctttttcgaaacggttttcactattggattctaaatttcttggggaacatttttcactaaaaatttccagatttcgagaatattttttcggaacgagttttttttgaccattttacccttttctccaaatttcacgatattggtgttgttagattcgtattgattgtgagattccatttatgaatagattgtggtgatttggagcgtgctcgaaagggtaaaactcaaatttgagttactagttgaagtgttttgaggcaagtgacttctaaactttgttaaactcttagactacacatgactactttcctaattgtgttggggagtaatggggattgaggatgggttttatttgttgattgaaattgttgtaaatgaaagatggggaataaaacgagctaagtgtgttatatgtgacttgaatttgttgaataagtcatgtgataaccgatattgaggggatagaagagcatgagtaagctatgattgatacagacattgatgttgagacagatgatgtgtaatactatgatatggttgtgattgagacagacgatgtgtaatactatgatgtggtcgcgatatggttgtgattgagacagataatctgtaatactatgatgtgatcgtgatatgattgtgattgatgacatgtgcatattcattattcatctcatgtgtgaactatctgttgcatgagttctgagacactgatatgaggatggatggctatgagacacagttgagactagctccggctagagatatatgagatggactagctccggctagcgatttggatgccgatgggatctggttccggcggtgatacatggtccatgtgtggcccccatgggttctgatttgagtattcagcgcggactgattacgtcaacagatatgtatcgtaggacagacatgcatcatgactatatgacattattattgcatttgcatcgcatttgacttcatctttgtctgtggtgtgtggagtttacctatttgcccctcttcatgtgatatatgatctatttgctcttacatgaggatatgaggttgatgttgagacactgttggatatatctgttgattatgaattgtgtagtataggttgttggttcgctgttagaatgaagtctcggtggttcggttgggattgaaaggagttgtttgtagctgctagtttagcttagtttagtgttacttgcgagtacctgttgcttttggtactcacccttgcttctacacagtggtgtaggttgacagctctatcagattcgacttattactcatcttcaaattagagcttccagacttacttgagaggtagcggttcattccagacgtgccctcaagttatctatatttattgttttgttctattatagaactttactatgagacttgtatattttattcagattccgtactagaggtttgtacatgtgacaaccaattctggggtttcattgagtttatttaaagacttccgcttatctttctatcttattcttgttttattaattccgtatcgtcgggtttttgggtgttaggcatcacatccggttttggagtgtgacagtgtgtgcaatcttactaatatataatattactttagagtaactaactgtaggaatatataatagagaagattctataggaataattctaaagaatacattctaatttattctttgacttgttgaaaacaaataaacactgaatatatattagattaaatactattaaagcaagatataataggataaaaagttttaagataaatttatgtaaaaagttttaaggttattttatttcataaataagtaacgagagtttaggagatttaacaaattattagaaaggagttaccaaaattatgttgaaaaggtttaacatagcttgattaaggaacaatcgatattaaatactaacaaagtaattgaaaatgaaacaaaaataaatgaggaaaaaatcacatgaaaagatttttcttttcttgtctacatctaataaaagacaaaaaagaaattgaagaaaaaaatcatgaaaatcatatgtccctatttatttgtttgtctacatcgaataaaagacaaaaaagtcatctcagataataatgatagtcagatcatctcttatcatgtctttatctcgctcctctctgttgggttctaaagggtgattagggcttgcaaataatatgattgataaattagttgacaaaaacttatactaaaaactaatattattatatgaaaactaatataaagaaaaatattaaaactgttgagagattaaatctccccataaacaaaactcactaaacgactacattgtggattctattatgttgtgctatgagaatagggatcttcaatttatagatctccaaatttttcctctaaggaaagaataaaccaaatatggaagaaaattatatttttcttttagaaaaagttcaagcatttatggtaatactttgacttttctttaaagaaaaaataaacttcaaataagataagaaaatcagggcaaaaccctaacactctcttcgatcccttactcttattttgtgcctcaatcatccaagtgaatttgttttctttctaaaacgatatatagatttgcaaaaatcaaagatctgtaatttcaaaatcatttatgagggacctaattattttctcctccaacacgatgtcactctaggccgattgacaaagaataagtttcctttttattttttgtacaaaaaagtcaagtgtgaaataattaatataaacttaaactacctcctttatggaaaaatatccgataaaattagaacaacacatactttaacataaaattattgaacctcttaaaaattacacaatcgttatggagaaagctaatcgagtatgtgacatggttataacaaaaacaaaaatggagaatctaatttaattccttataatcatacaaaattcatttattaacttgtaaaacaacatacacaagcatagaaataatgttatgataacaaggaaaggaaaagttctcaataaacatcatatcaattaattctctctatatataatgaaagtcagacagaaattagttctagatatatcacctttgtatccattgaactctagtaaatcaaccattggattagaaaccaattcctcatcttgatataccagcaacacagaaacctcttcagtcaaatcataaaaaggttctgtcattagattaatttgaatttgtaagaaaaacacttacaactgaagctatttataaagtatcatttactggcttatgagcctgtttagagataattatatataaataattttatctaaatatctagataatccctcaaatttgacacaaattgtaatttagatacttgaatttatctaaaagagaccaaataaatacttttactattgtcatatacgcactcatgaacaccttatgctgacatggcaaatttatgtgtattgtaaatgcttgtgttattacattattgaatcacaataaaaagattatttcttaaaaaaattaaatttttgattgacttttattccaacaatcaaattatacaacttggggttcattaactatttctattaatatcaaaatttaacattgattattggatattatttgaagttattgaagatgacattatatttattaagtattaattacacttcttgaatagttggaagattctttgatttgtgtccataattcaatagttcaaatggtgaatgtcttgtcttcaagtaacggctaatggtcttagaattaggccttatttatttttgttcggataaattagcccagagatattctaaatagagtatgatattgtgcactttgaccaagttagcataattttttttttttcaaaaagtctcacacattatggaaaaattacgcgagttggcaaatactactaggttattagtcattgagggtagggtatagtttaatttatttactgtcagtaaatacagtttcagtttttttgccattaataatgagacccaccacctctttgtatacctgtcacaccccaaaatcggatgtgatggcacgtgcccaaaccccaccggacacgtcagcctaacacccaaaaacccgacgatacgaaattaataaaacaagaataagatagaaagataagcggaagtctttaaataaactcaacataaccccagaattggttgtcacatgtacaaacctctaatacggaatctgaataaaatatacgagtctcatagtaaagttctagaatagaacagaacaataaatatagataacttgagggcacgtctggaatgaaccgctacctctcaagtaagtctggaagctctaatctgaagatgggtaataagccggatatgacagagctgtcaacctacaccactgtgtagaagcaagggtgagtaccaaaagcaacaggtactcgcaagtaacactaaactaagctaaactagcagctacaaacaactcctttcaatcccaaccgaaccaccgaaacttcattctaacagcgaaccaacaaccaatactacacaattcataatcaacagatatatccaacagtgtctcaacatcaacctcatatcctcatgtaagagcaaatagatcatatatcacatgaagaggggcaaataggtaaagtccacacaccacagacaaagatgaagtcaaatgcgatgcaaatgcaataatgatgtcatgtagtcgtgatgcatgtctgtcctaagatacacatctgttgacgtaatcagaccgcgctgaatactcaaatcagaacccatgggggccacacatggaccatgtatcaccgccagaaccagatcccatcggcatccaaatcgctagccggagctagtccatctcatatatctctagccggagctagtctcaactgtgtctcatatccatccatcctcatatcagtgtctcagaactcatgcaacagatagttcacacatgggatgaataatgaatatgcacgtcatcaatcacaatcatatcacgatcacatcatagtattacacattatctgtctcaatcacaaccatatcacgaccacatcatagtattacacatcatctgtctcaatcacaaccatatcacgaccacatcatagtattacacatcatctgtatcaacatcaatgtctgtatcaatcatagcctactcatgctcttctatcccctcaatatcagttatcacatgacttattcaacaaattcaagtcacatataacacatttagctcgttttattccccatctttcaattacaacaatttcaatcaacaaataaaactcatcctcaatccccattactccccaacacaattaggaaagtagtcatatgtagtctaagaatttaacaaagtttagaagtcacttgcctcaaaacacttcaactagtaactcaaatctgagttttactcttccgagcacgctccaaatcaccacaatctattcataaatggaatcccacaatcaatacgaatctaacaacaccaatatcgtgaaatttggagaaaagggtaaaatggtcaaaaaaaatctcgttccgaaaaatattttcgaaatctggaaatttttagtgaaaaatgttccccaagaaatttagaatccaatagtgaaaaccgtttcgaaaaaggagttgaaatgagttcacaaactcaaattttctattaaattcggattaggcaaaaaaccccaaattttacagttgagatctcaaattttgatgttaaaatccataaataatcgatggaaatcaaagatctaagttggaaataacttacccaatgaattccttgcgaaaatccacttgaaatcacctattttcgagctctcaaagtctaaaaatggagaaatgggtatttttcaagttggggaaaatggctactgttttttttgacttaaaagggctgctattgcagctgaaacacaaccataacaccaaagtttaagtccccgttggaccctcgggattcgttcgaaatctcgtgcacacaaactaaatatgtacccccactaaattcgacgttccggactcaatggaaccgtcggaatttaaattcgaggactccttgacccgaaattcaataagatgccaagaaactagtttaacgccaaaaaaattcgaaactcaatcggagcgtctaaaaattcaaccaagactcattctagacttagaatcgccccccgaaaccaacggtactcttggaatttcaatctgagcctcggaaccttatatgttgaccaaagtcaactctttatcaaaatttcacaactttagcaacttaggacctcaattcttcgtttcaactccaaattcaactccgtaacttcacacagacccgttttgacattctaaaactgccggaatcgacggaattccgatccgagtcccgaaactccaaataactcgaaaaagcactttttaaccaactttaactcataaaaactaaacttctcaaaaactcaactttttaccaacttttcctcaaactaactttacaaccacaaaacatgggactcgaggtaactaccgaaagggcaaaatagtcacttccacgaaaaattaccaaaatgacctttcgggtcattacaataccgaatcaacaaagccttcatcggcctttatttatgattttatacaaaatcaaatttatctctcatctcctctcctctcctcatttcctatttttctcctaaaataactctttcacttccaatttgaaattcgaatttcactttctccctccagtcgtgttttactttttgcaggtaaccgcctaaatcataggtgaacctcttttttttttttttttcatttttcaattgtatatgtattgtgcttgttagtgtttggataattttttctcaaaattccctcattacttattagataatcatttttatagaaaataaaatggatgattcgactagaggattatgagaggtacgtcattgcatgtcaaagtttttaataatcaaccttcattttcactctgtttaactcaagattttggagtcaatgcagggtctatggaaaaatctaaacaaattctagagtaaaaatctattgaagaattgagatccaagaaaaaaatgacccaattgcacttccagaagtcatcaacaatgtcaaggcaagcgacattaaaattgttgaaggagaaagtaagaggaaagccaaagatagtgattctgaggaggttgtgtctccttcattagatcaagacaaatacgaagaacatcaggtatttgcttaaaacacaattgtatgtagatatttgtatattttgttagtgatatacaaaattgtatgtagtatatgtatattttctgcttacatcacaattgtatatagatatttgtatattttgttagttatatacaaaattgcttgaagtatatgtatattttttgcttaaatcataattgtatatatatatttgtatatcttgtaagttatatacaatagtatgaattaaacaatatacaaaccttacattattatatatacagttaggttacaccaaaaattatcaaattaaagcacaacttttttatcgaatcatatacaattcatatatataattgacttagtaattttatacaactacttacacttatacatggtataagaattttgcacaattacttacatatatacaatattatcaattaaacaatatacaaatcgtataacttatatatacagtaaaattacaacaacaacaacaaaaattatcaaattaaagcacaccgttgttgtcgaatcatatacacttcatatataaaaattgtgtcattcaatttttcgaacaaaaaattagaattgaattggtaataaaaaatttatctaatcttgtataaacaaaattaaattattgcaaaccattagaatgaaaaaaacaaaaataatccgttttccaaaatttcaattatatactatacaaatcaattgtatactttcttgctgttcaaaacatgaagtttccttgaaagaaacgcttacctagcgttgaatatacaagaatattgattaatcttatgcttcagtcgtttgaggaacccagttgttatggtgtttctattgctatagaactcctttttggaaaaatatttgattttggacgattagcttgaacattgggactatataaattttttattaccgtatttagcactcatgtatccatttattaaaaaaaaatgtataaattatatttttaaaagaaaatatacaaaattaatgcttcatagcaaactaaactatgcccattgaatgtaattactaaactatacctatagagcgttatttcattaaatacgtttatcatatatgaaattttcccttaagagatcctacaccttatatatagcttctcaaatgtggaaattcaatctcacacccaacaatctttccctcagactaagtttcatggcccaatatcacaatgatccacgagtcaattcatgagattcactatgtgcatcacccacatcgtctaagtattttatggcaatcaagccctacaactagcttcttctttatatatatatgtgtgtgtatatgtgcgcgcgcgcgcatctctaattaatctcgtaaagggattaaggggccaatttcaaagaattaggcgattttcttagtttttcgtgtgtgttaacccataaatattttggtgatatggttttcggacgatttcttttgtgcaacttatatggaacccttcgtagggagttagtctcacactttttagagtccattttgggcactcaggggctaatttataggaaataggtgatcttctcagtccgtctgtattagcccatgaatattttggtgatatgtcttccgaataatttctttgtaaaatctttacgggaccctccatagggagttaatggagcagtacgtatagtctcacaattttagagttcattttgggcatttaggggccaatttacaggaattaggtgactttctcagtgttttgtgtgtgttagcccattaatatttggtgatatgactttcagacgatttctttgctacacatttacgaaaccctctgtagggagtcgggggagcagtacgtacaatctcacaattttagagtccattttagacatttaggggccaatttaaagaaattggacaattttctcagtttttcgtgtctgttagccattaatatattggtgaatatgacctacggatgatttctaatagaaatctttacgaaaccttcaatagggagttgggggagcaatacgtaccgtctgacaatttttagagtccattttgggcatttaagggccaatttacaggaattagacaattttctcagtatttttccatgtgttagcccataaatattttgttgctttgacttttagagtctaaacttctcatgtatattaagagatatttatgcttggttaattgaatcgaactaggaatagagaaattcctacttggatcttaatatttctctctctttgatttggaaaattctacgaagttgctttcaatggaattaaaatcataaatctattgtatgtaagaaacatacttatattcatgaatagatatgtgtagggtctaataatgaattatcacaattttttctactttttcctgtcagagtcctgctttttctttttctttttcttttttaactttggtctctgcttttgtctacatgatgataaggttggtggacctagctggaaatgtgatggaaatagctagtaaaagaaagaactttgcattttctgttttcttaaaaactgaaaaattacataacttgtggcaatttgttcattttcatactgagagatatttctattttttggatatatggcttatgctgctgttacttcccttatgagaaccatacatcaatcaatggaacttactggatgtgatttgcaaccgttttatgaaaagctcaaatctttgagagctattctggagaaatcctgcaatataatgggcgatcatgaggggttaacaatcttggaagttgaaatcgtagaggtagcatacacaacagaagatatggttgactcggaatcaagaaatgtttttttagcacagaatttggaggaaagaagcagggctatgtgggagatttttttcgtcctggaacaagcactagaatgcattgattccaccgtgaaacagtggatggcaacatcggacagcatgaaagatctaaaaccacaaactagctcgcttgtcagtttacctgaacatgatgttgagcagcccgagaatataatggttggccgtgaaaatgaatttgagatgatgctggatcaacttgctagaggaggaagggaactagaagttgtctcaatcgtagggatgggaggcatcgggaaaacaactttggctacaaaactctatagtgatccgtgcattatgtctcgatttgatattcgtgcaaaagcaactgtttcacaagagtattgtgtgagaaatgtactcctaggccttctttctttgacaagtgatgaacctgatgatcagctagcggaccgactgcaaaagcatctgaaaggcaggagatacttggtagtcattgatgacatatggactacagaagcttgggatgatataaaactatgtttcccagactgttataatggaagcagaatactcctgactactcggaatgtggaagtggctgaatatgctagttcaggtaagcctcctcatcacatgcgcctcatgaattttgacgaaagttggaatttactacacaaaaagatctttgaaaaagaaggttcttattctcctgaatttgaaaatattgggaaacaaattgcattaaaatgtggaggattacctctagcaattactgtgattgctggacttctctccaaaatgggtcaaagattagatgagtggcaaagaattggggaaaatgtaagttcggtcgttagcacagatcctgaagcacaatgcatgagagtgttggctttgagttaccatcacttgccttctcacctaaaaccgtgttttctgtattttgcaattttcacagaggatgaacagatttctgtaaatgaacttgttgagttatggcctgtagagggatttttgaatgaagaagagggaaaaagcatagaagaggtggcaacaacatgtataaacgaacttatagatagaagcttaattttcatccacaattttagttttcgtggaacaatagaaagttgtggaatgcatgatgtgacccgtgaactctgtttgagggaagctcgaaacatgaattttgtgaatgttatcagaggaaagagtgatcaaaattcatgtgcacaatccatgcagcgttcctttaagagtcgaagtcggatcagaatccataaggtggaagaattggcttggtgtcgtaacagtgaggctcattctattatcatgttgggtggattcgaatgcgtcacactggaattgtctttcaagctagtaagagtactagatcttggtttgaatacatggccaatttttcccagtggagtactttctctaattcatttgagatacctatctttgcgttttaatccttgcttacagcagtatcaaggatcgaaagaagctgttccctcatcaataatagacattcctctatcgatatcaagcctatgctatctgcaaacttttaaacttaaccttccatttcccagttattatcctttcatattaccatcggaaattttgacgatgccacaattgaggacgctgtgtatgggctggaattacttgcggagtcatgagcctacagagaacagattggttttgaaaaatttgcaatgcctcaatcaattgaaccctcggtattgtacagggtctttttttagactatttcccaatttaaagaagttgcaagtatttggcgtcccagaagactttcgcaatagccaggacctgtatgattttcgctacttatatcagctcgaagaattgacatttcgtttatattatccatatgctgcttgctttctaaaaaacactgcaccttcaggttctacgcaagatcctctgaggtttcagacggaaatattgcacaaagagattgatttcgggggaactgcacctccaactttactcttacctcctccggatgcttttccacaaaaccttaagagtttaacttttaggggagaattctctgtggcatggaaggatttgagcattgttggtaaattacccaaactcgaggtccttatactatcatggaatgccttcataggcaaggagtgggaagtagttgaggaagggtttcctcacttgaagttcttgtttctggatgatgtatacattcgatactggagagctagtagtgatcactttccgtaccttgaacgagttattcttagagattgccgtaatttggattcaatccctcgagattttgcagatataaccacactagctcttattgatatagattactgtcaacaatctgttgtgaattccgccaagcaaattcaacaggacattcaagacaactatggaagctctatcgaggtccatactcgtcatcttttgtaagacatcttcttccttgctttacaacaataattaactcatcatcatagtaaactcgataataatctggataatagccttagtaagtcaaattgcaccaattcaacaaaagttcttgatgctgtcattgtgtttgatttgaatccttccaatattgtgtaacttgttatacttgcatgttcattcttgattttgggaagtgtaacatttcatttttcatcttttgtggctagcattcccaagagtgtgacaacagttgaagatgatgatgatagtgtgacaacagatgaagatgatgatgatgatgactttgagaaagaagttgcttcttgccgcaataatgtgtaagttcttatacctgcatgctcattcttgctataatgttctcttgttccttaattatgggacatctgacatattattttccatgttttgcgtcttttatttttctgcagcgagtagttaaggtgttctgaggactagccagttctctgaaataaatgtcaaatcagaagccaaatgtgtgagtgtttgttttgttcgttttcattttttctgcataaggtggcaggatgattgcaaatggcttgtaatttaattgtatatgatctttcgtatagccatttgtcagtggttcttaagatactccaaattttatgcacatacatacatactgtacaggccagaacagactccagtaacgtgtgtttcctttcttgggagtcctcaatctacctcgcaaaggctaaatccagtggcaccagctttattactaaaacattcacacgggaacagttgagaaaaactaggcctccataccaaacacacccttaaacttgagctggttgatagagactagagagtagagagcactacatggattatggacctagctaaaagaaagaccttttgtttgaagataagcttaagaaattcgcacactctctgtcaccttgacacaagtgttctcctcgaccccaactaataatgtatgatcacaaatttcctgtcttttttttaaactttggtctcttcttttgtctacatgatgataaggttagtgacctcgcatctttctactttatcctgttagtggacctagctggaaatgtgatggaaatagttagtaaaagtaagatctttgcattttctgttttcttaaaaactgaaatattacataacttgtggcaattaatttgtccattttcatactgagagtgagagagtcctattttttggatttatggcttatgctgctgttacttcccttatgagaaccatacaccaatcaatggaaattattcaatgtgatttgcaaccgttttatgaaatatgttttttgacttacaaacattgaattaaaatcttttgaacttttataaattaagatttttttcttttaaagaaatcgatactgtaatcctctatatcaacgagcttactcatgtgaaggtcaagtgataaaaccaggggccagagccagtctagacctagggggttcggagcttttgtaattggatcattgtgattacgggttgaatgtctaattttctaggcgattatgatagtattttgtatctgaataatagctcactttttctaagtaatggaaaagaaggtcaaaacgtgccactaaaagacttgactaagacaaaaatgggttgtcaagaacgtagaggagggtaggatggacagttggtcagatctagtatggataatacatggaggtagttggagtggcggctctcccaaaattctgtcatcttagatctttggattcggtcttatacatatgtgaggaaggtaatgaaaaatattggggtagaggattacaacatggggaatcaagatttcagatggtcagtcaactaactgagctactaagatttcaaaaaaaagaaaaagaagggttccatgtgacatgaaagtctcatattgcatagtttttgaatgaggcaaagaagtgaggaatcagatgaaccaccttcgatggaaaattatactatttatacatatagttaaaattgttttctatctttatattattgtagtcagctaatttgcatgtttacttattcatattttgaatagacataatacataaatacatcctttaacttggcttcaaatcaaatttatgcccttcaactttggatgtgcacaaatagacatttaaatttgtataaagttgaagaaatagacacacatgtcctacatgacatcctacatgtcattttttatcctacgtggtgtcttacgtgtattgtgtcatgtaggactcgtgtggctagtcgctcaactttatacaaatttaagtgcatacttgtgcatacccaaagtcggagaacataaacgtcaaatgaggtcaagttaaagggcacatttatgtattatgccttcttgatttcattaataatgaaaatcctgaatcatattcagattccgtcactaatcgttgaattaatatactatgtattatttattggatttttttgctatcttatttttaattgttcaaagttttgtttattatctttagcataatatctgattatattattttgatatactttttctagccctaattacttgtccatttttgaattgacacacctattaagaaaacaattattgaaatagtgagtttactattttacccatattaattatgaagtgggtgatttaaaaactcaagattttcaaaaagttctacttttttcaaagtaataaattaagggtataatatgtaaaaaaaattattctttcttgatttgtcaaaatagaaaagtaattaggaataactaaaaaaatggataaataattaaaaacggagggagcaatatgttatctttagcctaataatatctgattaatggccaccctaattgattggataggagaggatagacttgcttccaagtaagccaaaatataaaaagttgacaaaagggtgctaaattcgagacacatgtagtacttatataattcatgtgcggactcgttcttttgtagtactccttccgttctattttatatgtcatatttttattttatactttcattaagaaatgatgtaattttatctttctattcttatttaatgtttttttaagtcaattttataataaatgatgaatatattttcaagattaattaactactctatcaagggtataataggtaaaatatggtaatttatacataaattttataaaatgacaagtattgtggtccaactatttatagaaagagatgacatataaaatgggacggagggagttataaagttgacttaagaaaacatttaataagggtagaagggtaaagttacattatttcttaatgtaaatgtaaagtaaaaatgtaacatataaaatgggaaggagggagtagtattttctcgttttattttacgtggcactctattctcataatctatctttaaaaatgtcattttattgtaattgaaaataatttaacttaaaattctccatctacccttaattaatgaaatgatttacaattatataaatatataaaaattgttttagcttataattttctaaaatctttttttctcttatacatcgtattaagtcaaacaatactaagtcaaatggaatggcggagtatttcttttattttttttcacaccgtccatatgttttctcccatcccccagacccccactatgtatattcactccttagttgaatctgaatttagagtttagaagctt

SEQ ID NO: 258 - DNA, 396 bp, Arabidopsis thaliana
  source 1..396: mol_type = genomic DNA
atgtctacaccatcaggttcaaatccgttaccaatggccgacaagttagaagcaaaaggtcgtatagcatccatcaagttcgactatgtcaagaatggtcaacctaaagctggatcaacccatggtgtctcatatcacaatttcaccgagtggtttgatcttaaccatacatgcgatgagcatatcttatctgtgaagtgttactacgatgatggtgagatacaaggacttgtgatcaaaaccaatatcaggacgtctgcatatatgggatataacattggtactacgtttacacttgaagtcaaaggcaagaagatcgttgggtttcatggatcttttgataaaaaccttacctcgcttggagcttatttcgcaccgctttctcctgctaagtaa

SEQ ID NO: 259 - DNA, 978 bp, Pepper mild mottle virus
  source 1..978: mol_type = genomic DNA
cacaaacacgtttttattccggctgtgtagtctttcaacgttgtcttccgatgcccgtgtttccaaacttcagccaagaaatcgtctaagcctaaccttttccaaatctcatactcgactgcacaatgaaattcgttctgtgatttgtcatacttggaaatgtctagctctaatatgtccataggaacattagagtccagatctgagaaaaattcttcgatctgtgtaggcgttttccttgtataaaacatgaatcttgaactgtcaattgtctctagcagctgtcttgttaattctgaaaatacaggaccaaaaagcgcattgattttcttgctatgatacacaatagtttgcaaagccgggtattcagtttgaatactaagatccaaacgctgtttcggctgctgcttgatcatgtgcctgtattgatcaacggctggtaaatcaataaagtcaaaatcagccaactggccaattgttgacttctcttgcttttcgatccatctttccaaactcgcccttgaaagcagaggtatattttttggttttttcttttctttaattaagtatgcatcaaaaaacttatctactactagagaagcggtgtcttcgatgtcaacaacccctactaattcgggagagttgaaatttcttttgatcatcgcgaccaaattttccaacaatccaggttttcgaggtttttcagcagcagtcctgatcacaggtttcaatgtcgtctcagattctctcggaagaggcaccgatttcgacatatccaacacacaatccttgacattcaaactattctctcgtatttgcatagttacagcatcatactcattgagtatagtactgtttcccggcaaacacttgtcgtaataatattgcatgtcagaaacatctcctgtttttggtgctgcgacgaaaaggttaacacctttgtacaccgattctatctgtaattgctattgagtcgac

SEQ ID NO: 260 - DNA, 2370 bp, Bacillus thuringiensis
  source 1..2370: mol_type = genomic DNA
atgaacatgaataatactaaattaagcgcaagggccctaccgagtcttattgattattttaatggcatttatggatttgccactggtatcaaagacattatgaatatgatttttaaaacggatacaggtggtaatctaaccttagacgaaatcctaaagaatcagcagttactaaatgagatttctggtaaattggatggggtaaatgggagcttaaatgatcttatcgcacagggaaacttaaatacagaattatctaaggaaatcctaaaaattgcaaatgaacagaatcaagtcttaaatgatgttaataacaaactcgatgcgataaatacgatgcttcatatatatctacctaaaattacatctatgttaagtgatgtaatgaagcaaaattatgcgctaagtctgcaaatagaatacttaagtaagcaattgcaagaaatttctgataaattagatattattaacgtaaatgttcttattaactctacacttactgaaattacacctgcatatcaacggattaaatatgtgaatgaaaaatttgaagaattaacttttgctacagaaaccactttaaaagtaaaaaaggatagctcgcctgctgatattcttgatgagttaactgaattaactgaactagcgaaaagtgttacaaaaaatgacgttgatggttttgaattttaccttaatacattccacgatgtaatggtaggaaataatttactcgggcgttcagctttaaaaactgcttcagaattaattgctaaagaaaatgtgaaaacaagtggcagtgaagtaggaaatgtttataatttcttaattgtattaacagctctacaagcaaaagcttttcttactttaacaacatgccgaaaattattaggcttagcagatattgattatacttctattatgaatgaacatttaaataaggaaaaagaggaatttagagtaaacatccttcctacactttctaatactttttctaatcctaattatgcaaaagttaaaggaagtgatgaagatgcaaagatgattgtggaagctaaaccaggacatgcattggttgggtttgaaatgagcaatgattcaatcacagtattaaaagtatatgaggctaagctaaaacaaaattatcaagttgataaggattccttatcggaggttatttatggtgatatggataaattattgtgtccagatcaatctgaacaaatttattatacaaataatatagtatttccaaatgaatatgtaattactaaaattgattttactaagaaaatgaagactttaagatatgaggtaacagctaattcttatgattcttctacaggagaaattgacttaaataagaagaaagtagaatcaagtgaagcggagtataggacgttaagtgctaaagatgatggagtgtatatgccgttaggtgtcatcagtgaaacatttttgactccgattaatgggtttggcctccaagctgatgaaaattcaagattaattactttaacatgtaaatcatatttaagagaactactgttagcaacagacttaagcaataaagaaactaaattgatcgtcccgccaagtggttttattagtaatattgtagaaaatgggaacttagagggagaaaacttagagccgtggatagcaaataataagaatgcgtatgtagatcatacaggcggagtgaatggtactagagctttatatgttcataaggacggaggattttcacaatctattggagataagttaaaaccgaaaactgagtatgtaatccaatatactgttaaaggaaaaccttctattcatttaaaaaatgaaaatactggatatattcattatgaagatacaaataacaatttagaagattatcaaactattactaaacgttttactacaggaactgatttaaagggagtgtatttaattttaaaaagtcaaaatggagatgaagcctggggagataactttacaattttggaaattagtccttctgaaaagttattaagtccagaattaatcaatgtaaataattggattcgcacgggatcaactcatattagcggttatacactcactctctatcagggaggaggaggaaatctaaaacaaaaccttcaattagacagtttttcaacttatagagtgaatttttctgtgaccggagatgctaatgtaaggattagaaattctagggaagtgttatttgaaaaacgatatatgagcggtgctaaagatgtttctgaaattttcactacaaaattggggaaagataacttttatatagagctttctcaagggaataatttatatggtggtcctcttgtacatttttacgatgtctctattaagtaa

SEQ ID NO: 261 - DNA, 2370 bp, Bacillus cereus
  source 1..2370: mol_type = genomic DNA
atgaacaagaataatactaaattaaacgcaagggccctaccgagttttattgattattttaatggcatttatggatttgccactggtatcaaagacattatgaatatgatttttaaaacggatacaggtggtaatctaaccttagatgaaatcctaaagaatcagcagttactaaatgagatttctggtaaattggatggggtaaatgggagcttaaatgatcttatcgcacagggaaacttaaatacagaattatctaaggaaatcttaaaaattgcaaatgaacagaatcaagtcttaaatgatgttaataacaaactcgatgcgataaatacgatgcttcatatatatctacctaaaattacatctatgttaagtgatgtaatgaagcaaaattatgcgctaagtctgcaaatagaatacttaagtaaacaattgcaagaaatttctgataaattagatattattaacgtaaatgttcttattaactctacacttactgaaattacacctgcatatcaacggattaaatatgtgaatgaaaaatttgaagaattaacttttgctacagaaaccactttaaaagtaaaaaaggatagctcgcctgctgatattcttgatgagttaactgaattaactgaactagcgaaaagtgttacaaaaaatgacgttgatggttttgaattttaccttaatacattccacgatgtaatggtaggaaataatttattcgggcgttcagctttaaaaactgcttcagaattaattgctaaagaaaatgtgaaaacaagtggcagtgaagtaggaaatgtttataatttcttaattgtattaacagctctacaagcaaaagcttttcttactttaacaacatgccgaaaattattaggcttagcagatattgattatacttctattatgaatgaacatttaaataaggaaaaagaggaatttagagtaaacatccttcctacactttctaatactttttctaatcctaattatgcaaaagttaaaggaagtgatgaagatgcaaagatgattgtggaagctaaaccaggatatgcattggttggttttgaaatgagcaatgattcaatcacagtattaaaagtatatgaggctaagctaaaacaaaattatcaagttgataaggattccttatcggaggttatttatggtgatacggataaattattgtgtccagatcaatctgaacaaatatattatacaaataacatagtatttccaaatgaatatgtaattactaaaattgatttcactaaaaaaatgaaaactttaagatatgaggtaacagcgaatttttatgattcttctacaggagaaattgacttaaataagaaaaaagtagaatcaagtgaagcggagtatagaacgttaagtgctaatgatgatggagtgtatatgccattaggtgtcatcagtgaaacatttttgactccgataaatgggtttggcctccaagctgatggaaattcaagattaattactttaacatgtaaatcatatttaagagaactactgctagcaacagacttaagcaataaagaaactaaattgatcgtcccgccaagtggttttattagcaatattgtagagaacgggtccatagaagaggacaatttagagccgtggaaagcaaataataagaatgcgtatgtagatcatacaggcggagtgaatggaactaaagctttatatgttcataaggacggaggattttcacaatttattggagataagttaaaaccgaaaactgagtatgtaatccaatatactgttaaaggaaaaccttctattcatttaaaagatgaaaatactggatatattcattatgaagatacaaataataatttaaaagattatcaaactattactaaacgttttactacaggaactgatttaaagggagtgtatttaattttaaaaagtcaaaatggagatgaagcttggggagataactttattattttggaaattagtccttctgaaaagttattaagtccagaattaattaatacaaataattggacgagtacgggatcaactcatattagcggtaatacactcactctttatcagggaggacgaggaattctaaaacaaaaccttcaattagatagtttttcaacttatagagtgtatttttctgtgtccggagatgctaatgtaaggattagaaattctagggaagtgttatttgaaaaaagatatatgagcggtgctaaagatgtttctgaaatgttcactacaaaatttgagaaagataacttttatatagagctttctcaagggaataatttatatggtggtcctattgtacatttttacgatgtctctattaagtag

SEQ ID NO: 262 - DNA, 2310 bp, Bacillus cereus
  source 1..2310: mol_type = genomic DNA
atgaaaaatatgaagaaaaagttagcaagtgttgtaacctgtaccttattagcccctatgttttttaatgggaatgtaaatactgcttacgcggacaacaaaatcaatcaggattcttcaaagcaggaataccaacagaaagagatggatcgaaaaggattgcttgggtattattttaaagataaagattttagtaaccttactatgttttcaccaacacgttataatacccttatttatgaccaacaaacagcgaataaattattagataaaaaacaacaagaatatcagtctattcgctggattggtttgattcagagtaacaaaacaggtgacttcacatttgaattatcagatgatgaatgtgcgattatagaaatggatgggaaagtgatttctaataaaggtaaagaaaagcaagttgtccatttagagaaaggaaaattagttccaattaaaattgagtatcaattagacgagccattaaatatcgatgatgaaaaattcaaagggtttaaattattgaaagtagataatcaaaaacaactacatcaagtacaacaagatgaattaagaaaccctgaatttaacaaaaaagagtcacaggaatttttagcgaaagcatcgaaaataaatctttttacgaaaaaaattaagagggacattgatgagggaacggatacagacggtgactctattccggatatgtgggaagaaaatgggtatacgattcaaaatagaatcgctgttaaatggaatgactcgctagcaagtaaagggtatacaaaatttgtttctaatccccttgacagtcacacagttggtgacccttatactgactatgaaaaagcatcgagagatttagatttgtcaaatgcaaaagaaacatttaacccattggtagctgcttttccaagcgtgaatgttagcatggaaaaggtgatattatctccaaataaaaacttatctaatagtgtagaatcgcactcatctacgaattggtcttataccaatactgaaggagcatctgttgaagctgggattgggcctaaaggtttttcttttggggtaagtgcaaactatcaacattctgaaacagttgcacaggaatggggggcatctataggagatactacgcaacttaatactgcgtcagcaggatatttaaatgcaaatgttcgatacaacaatgtgggaacaggagccatttatgatgtaaaacctacaactagctttgtattagaaaagaatacaatcgcaactattacggcaaaatcaaattcaacagctttaagtatatctccgggagaaagttatccgaaaaaaggccaaaatggaattgcgataacatccatggatgattttaactcacatccaattacattaaataaaaaacaattagatcaagtattgactaataaccctattatgttagaaacagaccagacagatgggatttataagataaaagatacacatggtaatattgtcacaggtggcacatggaatggtgtaactcaacaaattaaagcaaaaacagcgtctattattgtggatgacgggaaacaggtagcagaaaaacgtgtggcggcaaaagattatgcttatccagaagataaaacaccgtctttaactttaaaagatgcactgaagctttcattcccagaagagataaaagaaacagatggattattgtactataacaacaaaccaatttatgaatcgagtgtcatgacctaccttgatgggaatacggcaaaggaagtaaaaaaacaaataaatgataaaacaggggaatttaaggatgtccaacatttatatgctgttaaacttacacccaaaatgaattttactattaaagtaccggttgcgtatgatacagccaaacaggctgttaatcttggaggggataatccatggggggctaaaggattattagggacatgggtaaatgccatggttgtagataattccggagataaagcatataaaagggttgaacctggttatctactttcacctacattggagttttcagaaggttcattagacaatttaaagaaaaattatagtttttatgttagtatgtacgtgaaatcagataaaccatttactctaagaataaatgctggaccctatagtaccaagagaaccatagaagcatcaaatgattttaaacgcgttgatattcctgcgttttatatagaaggatttccgatagacactataagattagaaggttctgactatccatcggcaatatggtggaaagatgtttcaattacagaagtgtcagcagtaaaaaaataa

SEQ ID NO: 263 - DNA, 1389 bp, Bacillus cereus
  source 1..1389: mol_type = genomic DNA
atgaaaagaatggagggaaagttgtttatggtatctaaaaagttacaattagttactaaagctttattgtttagtacagttttatctatacctttattaaataatgaagaggtaaaagctgaacatttaaatctaaattctcaaagtaaatatcctagctttcaaaatcaaaaaatcactgataatgcagaggattttaaagaggataaggaaaaagcgaaagaatggggagaagtaaaagaaaaagagtggaaattaaccgctactgaaaaaagaaaaataaatgactttttaaatgatacaaacaaaataaaaacaaattataaagaaattactttttctatggcaggttcatttgaagatgaactgaaagatttaaaagaaattgataagatgtttgataaagccaatctctcaagttctattatcacctataaaaatgtggaacccgcaacaattggatttaataagtctttaacagaaggaaatacaattaattctgatgtaatggcgcagtttaaagaacaatttctaggaaaagatattaagtttgatagttatctagatactcatttaactgtccaacaagtttctagtaaagaaagagttattttgaaggttacagtgccgagtgggaagggttctactaatccaacaaaagcaggtgttattttagatggaaatgaacacaaaatgctcattgataatgggtatgtactccatgttgataaggtatcaaaggtagtaaaaaaggggctggagtgcttgcaagtggaagggaccttaaaaaagagtcttgactttaaaaatgatataagtgctaaagcgcatagttggggcatgaaaaattatgaagaatgggctgcaaatttaaccgattcccaaagaaaagctttagatggctatgctaggcaagattataaaaaaatcaatgattatttacgaaatcaaggcggaagtggaaatgaacaattggatgcacaaataaagaacatttctgaaactttaaacaataagccaataccagaaaatattactgtgtatagatggtgtggtatgccagaatttggttatcaaattagtgagcctttacctgccttaaaagattttgaatgggaatttttaaacacaatcaaggaagacaaaggatatattagtacgagcttatcaagtgaacgtctagcggcttttgggtcaagaaaaattatattacgattacaaatcccaaaaggaagtaaaggcgcatatttaagtgccattggtggatttgcaaatgaaaaagaaattcttctggataaagatagtaagtatcatatcaataaaataacagaagtagtcattaaaggcattaagcgatatgtagttgatgcaacattattaacaaattaa

SEQ ID NO: 264 - DNA, 1104 bp, Bacillus thuringiensis
  source 1..1104: mol_type = genomic DNA
atgaaaaatagattttcaaaagtggcattatgcaccgtaccgattttaatggtttctacattcgccagttcaagcatgtcagcttttgctgcagaagccaaatcaccagatttaaatgtatctcaacaagtaataggtccctatgccgaatcttatattgatattgtgcaggatagaatgaaacaaagggataagggatcaaaattaactggtaaaccaataaatatgcaagaacaaataatagatgggtggtttctagctagattttggatatttaaggatcaaaacaataaccatcagacaaatagatttatatcctggtttaaagataatattgctagttcaaaagggtataatagtattgcggagcaaatgggtttaaaaatagaagcagaaaacgatatggatgtaacaaatatagattatacatctaagacaggcgataccatttataatggtatttcagaattgaaaaattatacaggatcaactcaaaagatgaaaacagatagttttcaaagagattatacaaaatcagaatctacttcagtaactaatggattacaattaggatttaaagttgctgctaaaggagtagttgctttggctggggcagactttgaaaccagtgttacttataatctatcaactactacaactgaaacaaatacaatatcagacaagtttactgtcccatctcaagaagttacattgcctccaggacataaagcgatagtgaaacatgatttaagaaaaatggtttattctggtactcatgatctaaagggtgatttaattgtgagttttaatgataaagagattgtacaaaaatttatttatccaaattatagagaaattaatttatctgatatccgtgaaactatgattgaaattgatgaatggaatcatgtaaaccctgtgaatttttatgaattagttggggtcaaaaatcatataaaaaatggtgaaactttgtatatagatactccagctaaatttatgtttaatggtgctaatccatattatagagcaacatttacagaatacgacgggaataataatcctgttcaaacaaaggtattaagtgaaaactttaaattgtag

SEQ ID NO: 265 - DNA, 2862 bp, Spodoptera exigua
  source 1..2862: mol_type = genomic DNA
attgtgaagtgaaatgagatcataatatatttgtgtgtagcgatatttttattaagtagataaatttaaggaccataaatgaagaacctctaacaatttataatttgtgtaaaacataataaacagtttttaactgtgaatgtgcattaccgatttagtatgtgatttaaccccagtgataagagacttatcacttgctgttatttatataactttgatctgattacgaatcttaattaattacaaaatgtatatacatcgatcgactgtgttacgactgtgtgtgtgggtgagcctgttggctctatgtggggcccaacgcgcagagcaactcctggcacagaatccttgctccagcaagacgacgtgcagtgactgcatccgcacggccagctgcgcttggcgttttgcaggagagttcaatggccctcggtgcttcaaccctgccatggagcgagatggcactgcaggatgtgaagaatcctacatattcaacccagataataaacgctctgtcgaccccatgtacaatatggagttaagcagagctaagtctagaatgggcatgtctgctggttcatcttcttatgaagagtcttacagtgcacagggcagtagctttgctgcatcgggatcggcagcaggcgcaggcgctgaagcaggtggcgaaagattggtgcagatgaaacctcagaaagtgaatctcaacctcagaatgaatcaaatgcagaaacttacatttgcgtactccagagctcaagattatcctgttgacttatattaccttatggacttgagtagatctatgaaaaacgatagagagaaactcagtaccctgggaagtttactgtctgctaccatgaggaatatgacgtccatgttcaggatcgggttcggctcctttgtagataaactagtcatgccttatgtatctacagtgcctaagaatttgatatcaccttgcgacggttgcgcagcgccttatggataccaaaatcaaatgtctctgagtactgacaccgacttctttgagaaagcagtagctaacgcagacgtgccgggcaacttggacgcccccgaaggagggttcgacgcgatcatgcaagccgtggtgtgcaagcaacagatcggctggcgagaccaggctaggcgacttcttgttttctccacagacgctggtttccattatgctggcgacggaaagctcggtggtatcgtccaacctaacgatggcgaatgtcacatgaaggacaacacgtacacacactcgacgttgcaggattaccccagcatttcacagattaatcataaggtgaagaagcacgctatcaacgtaatctttgcggtaacggcggaacagatcagcgtgtacgaacagctgagcaagcacatcgaaggttccagtacgggagtgctgagcaacgattccgataacatcgtcgacctcgtccgggaacaatacaacaaaattacgtcaactgtagaaatgaaagactcatcgagtgacgctgtgcaaatagtgtattactcatcttgtctcagcggcaaagaactcacacagacgaacaaatgcgacggattaaaggttggcgatgtcgtggaattcacggctgagattacattgaaagaatgtcccaaagaccgcagcaagtggaagcagactttcgagatctcccccgtcggtatctctgacagcctcactgttgaactggaaatggtctgcgactgtccctgtgaacagcccaatcatcacgcgtacaacgacagtccgctagtatgcagcggcgagggcgtgtctgcgtgcggggtgtgcgtgtgccggccgggccgcttcggcaagaactgcgagtgctcggcgcacggcggcgtctccgccgagcaggagcgcggctgccgccccaccaacgccagcgccggcccgctctgctccaaccgcggcacctgcatctgcggcgtctgcgagtgcaacaagatggacgacccgctcaaggtgatttctggcccgttctgcgagtgcgataacttcacgtgtgacatgaacaaaggtttgctctgctcgggccccgaccacggggaatgtgtctgtggcaaatgtagctgtactcccgagtacaccggaccagcttgccagtgtttgaaggaccaaactccttgtcgatcacctgaaaataacgaaatatgtagcggtaacggaaaatgtgtctgcggtcagtgcgtgtgcaatgtagatgacgaccgtcattattccggaaaatactgtgaaaaatgtcccacctgcccaggccgctgtggtgaattcaaagactgtgtattatgcgaggtacacaaacgtggcccgctgtacaatgccgacacagacacctgtggcgactgtgcgctctatcccataatcgaagaaggcaaaattgaagccaacgaatctcgaaacgaacatttgtgtagtttctacgacgatgaagattgtttatatgtgtacgtgtactcctacaatgagaaccagcagcttgtcattagagcacagaaggaacgggaatgtcccaagaaggtaccaatcttgggaattgtgttgggagtgatcgctgcgatagtgttggttggtttggctttactgatgttatggaagatggcgactactatacacgaccgcagagagtttgcgcgcttcgagaaagaacgtatgatggccaaatgggacacgggcgagaaccctatttacaagcaagcaacatcgaccttcaaaaatcctacatatgctggaaaataattgtattacattacacaaaatagtcagcaaataaaatagtcgtctcaaaacgtaaagcaatcgaatgccgcatttataaaattatcaagatgtcagta

SEQ ID NO: 266 - DNA, 766 bp, Helicoverpa zea
  source 1..766: mol_type = genomic DNA
tgatttcgaattccatcgttcattccaagatgttcaatcaaactcagttgtttgtttttctcgctgtattcactacgagcagtgttttagggaataacaatgatgttaaggatggcgcagcgagtggagctcacagcgaccgactaggtctttggttcggtccccggctaggcaagcgctcgctcagaatatctaccgaagataacagacaagcattcttcaaattactcgaagccgccgacgctttgaaatactattacgaccagctaccttatgagatgcaagctgatgaacctgaaaccagggtcaccaagaaggtgatcttcacccccaagttaggcagaagcctcgcatacgatgacaaaagctttgagaacgtggagttcacgcccagactcggcaggagactgtccgatgatatgcctgccacccccgctgaccaggaaatgtaccgccaagaccctgaacagattgacagcaggacaaagtacttctccccaaggctcggcagaaccatgaacttctcaccacgactcggcagggaactgtcttatgatatgatgccaaataaaatcagggtagtcaggagtacaaacaaaacgcgatcaacataatttggagcaaaaacaagacgcaaagctagtctaacctcaaaatttttataaaacgtgttattttggacgaaataatgtactgttttgtataataagtattattaaataatattaaaaattagtattttgtcgaaataaaggacttaagatat

SEQ ID NO: 267 - DNA, 3468 bp, Bacillus thuringiensis
  source 1..3468: mol_type = genomic DNA
atggataacaatccgaacatcaatgaatgcattccttataattgtttaagtaaccctgaagtagaagtattaggtggagaaagaatagaaactggttacaccccaatcgatatttccttgtcgctaacgcaatttcttttgagtgaatttgttcccggtgctggatttgtgttaggactagttgatataatatggggaatttttggtccctctcaatgggacgcatttcttgtacaaattgaacagttaattaaccaaagaatagaagaattcgctaggaaccaagccatttctagattagaaggactaagcaatctttatcaaatttacgcagaatcttttagagagtgggaagcagatcctactaatccagcattaagagaagagatgcgtattcaattcaatgacatgaacagtgcccttacaaccgctattcctctttttgcagttcaaaattatcaagttcctcttttatcagtatatgttcaagctgcaaatttacatttatcagttttgagagatgtttcagtgtttggacaaaggtggggatttgatgccgcgactatcaatagtcgttataatgatttaactaggcttattggcaactatacagatcatgctgtacgctggtacaatacgggattagagcgtgtatggggaccggattctagagattggataagatataatcaatttagaagagaattaacactaactgtattagatatcgtttctctatttccgaactatgatagtagaacgtatccaattcgaacagtttcccaattaacaagagaaatttatacaaacccagtattagaaaattttgatggtagttttcgaggctcggctcagggcatagaaggaagtattaggagtccacatttgatggatatacttaacagtataaccatctatacggatgctcatagaggagaatattattggtcagggcatcaaataatggcttctcctgtagggttttcggggccagaattcacttttccgctatatggaactatgggaaatgcagctccacaacaacgtattgttgctcaactaggtcagggcgtgtatagaacattatcgtccactttatatagaagaccttttaatatagggataaataatcaacaactatctgttcttgacgggacagaatttgcttatggaacctcctcaaatttgccatccgctgtatacagaaaaagcggaacggtagattcgctggatgaaataccgccacagaataacaacgtgccacctaggcaaggatttagtcatcgattaagccatgtttcaatgtttcgttcaggctttagtaatagtagtgtaagtataataagagctcctatgttctcttggatacatcgtagtgctgaatttaataatataattccttcatcacaaattacacaaatacctttaacaaaatctactaatcttggctctggaacttctgtcgttaaaggaccaggatttacaggaggagatattcttcgaagaacttcacctggccagatttcaaccttaagagtaaatattactgcaccattatcacaaagatatcgggtaagaattcgctacgcttctaccacaaatttacaattccatacatcaattgacggaagacctattaatcaggggaatttttcagcaactatgagtagtgggagtaatttacagtccggaagctttaggactgtaggttttactactccgtttaacttttcaaatggatcaagtgtatttacgttaagtgctcatgtcttcaattcaggcaatgaagtttatatagatcgaattgaatttgttccggcagaagtaacctttgaggcagaatatgatttagaaagagcacaaaaggcggtgaatgagctgtttacttcttccaatcaaatcgggttaaaaacagatgtgacggattatcatattgatcaagtatccaatttagttgagtgtttatctgatgaattttgtctggatgaaaaaaaagaattgtccgagaaagtcaaacatgcgaagcgacttagtgatgagcggaatttacttcaagatccaaactttagagggatcaatagacaactagaccgtggctggagaggaagtacggatattaccatccaaggaggcgatgacgtattcaaagagaattacgttacgctattgggtacctttgatgagtgctatccaacgtatttatatcaaaaaatagatgagtcgaaattaaaagcctatacccgttaccaattaagagggtatatcgaagatagtcaagacttagaaatctatttaattcgctacaatgccaaacacgaaacagtaaatgtgccaggtacgggttccttatggccgctttcagccccaagtccaatcggaaaatgtgcccatcattcccatcatttctccttggacattgatgttggatgtacagacttaaatgaggacttaggtgtatgggtgatattcaagattaagacgcaagatggccatgcaagactaggaaatctagaatttctcgaagagaaaccattagtaggagaagcactagctcgtgtgaaaagagcggagaaaaaatggagagacaaacgtgaaaaattggaatgggaaacaaatattgtttataaagaggcaaaagaatctgtagatgctttatttgtaaactctcaatatgatagattacaagcggataccaacatcgcgatgattcatgcggcagataaacgcgttcatagcattcgagaagcttatctgcctgagctgtctgtgattccgggtgtcaatgcggctatttttgaagaattagaagggcgtattttcactgcattctccctatatgatgcgagaaatgtcattaaaaatggtgattttaataatggcttatcctgctggaacgtgaaagggcatgtagatgtagaagaacaaaacaaccaccgttcggtccttgttgttccggaatgggaagcagaagtgtcacaagaagttcgtgtctgtccgggtcgtggctatatccttcgtgtcacagcgtacaaggagggatatggagaaggttgcgtaaccattcatgagatcgagaacaatacagacgaactgaagtttagcaactgtgtagaagaggaagtatatccaaacaacacggtaacgtgtaatgattatactgcgactcaagaagaatatgagggtacgtacacttctcgtaatcgaggatatgacggagcctatgaaagcaattcttctgtaccagctgattatgcatcagcctatgaagaaaaagcatatacagatggacgaagagacaatccttgtgaatctaacagaggatatggggattacacaccactaccagctggctatgtgacaaaagaattagagtacttcccagaaaccgataaggtatggattgagatcggagaaacggaaggaacattcatcgtggacagcgtggaattacttctcatggaggaatag

SEQ ID NO: 268 - DNA, 3468 bp, Bacillus thuringiensis
  source 1..3468: mol_type = genomic DNA
atggataacaatccgaacatcaatgaatgcattccttataattgtttaagtaaccctgaagtagaagtattaggtggagaaagaatagagactggttacaccccaatcgatatttccttgtcgctaacgcaatttcttttgagtgaatttgttcccggtgctggatttgtgttaggactagttgatataatatggggaatttttggtccctctcaatgggacgcatttcttgtacaaattgaacagttaattaaccaaagaatagaagaattcgctaggaaccaagccatttctagattagaaggactaagcaatctttatcaaatttacgcagaatcttttagagagtgggaagcagatcctactaatccagcattaagagaagagatgcgtattcaattcaatgacatgaacagtgcccttacaaccgctattcctctttttgcagttcaaaattatcaagttcctcttttatcagtatatgttcaagctgcaaatttacatttaccagttttgagagatgtttcagtgtttggacaaaggtggggatttgatgccgcgactatcaatagtcgttataatgatttaactaggcttattggcaactatacagatcatgctgtacgctggtacaatacgggattagagcgtgtatggggaccggattctagagattggataagatataatcaatttagaagagaattaacactaactgtattagatatcgtttctctatttccgaactatgatagtagaacgtatccaattcgaacagtttcccaattaacaagagaaatttatacaaacccagtattagaaaattttgatggtagttttcgaggctcggctcagggcatagaaggaagtattaggagtccacatttgatggatatacttaacagtataaccatctatacggatgctcatagaggagaatattattggtcagggcatcaaataatggcttctcctgtagggttttcggggccagaattcacttttccgctatatggaactatgggaaatgcagctccacaacaacgtattgttgctcaactaggtcagggcgtgtatagaacattatcgtccactttatatagaagaccttttaatatagggataaataatcaacaactatctgttcttgacgggacagaatttgcttatggaacctcctcaaatttgccatccgctgtatacagaaaaagcggaacggtagattcgctggatgaaataccgccacagaataacaacgtgccacctaggcaaggatttagtcatcgattaagccatgtttcaatgtttcgttcaggctttagtaatagtagtgtaagtataataagagctcctatgttctcttggatacatcgtagtgctgaatttaataatataattccttcatcacaaattacacaaatacctttaacaaaatctactaatcttggctctggaacttctgtcgttaaaggaccaggatttacaggaggagatattcttcgaagaacttcacctggccagatttcaaccttaagagtaaatattactgcaccattatcacaaagatatcgggtaagaattcgctacgcttctaccacaaatttacaattccatacatcaattgacggaagacctattaatcaggggaatttttcagcaactatgagtagtgggagtaatttacagtccggaagctttaggactgtaggttttactactccgtttaacttttcaaatggatcaagtgtatttacgttaagtgctcatgtcttcaattcaggcaatgaagtttatatagatcgaattgaatttgttccggcagaagtaacctttgaggcagaatatgatttagaaagagcacaaaaggcggtgaatgagctgtttacttcttccaatcaaatcgggttaaaaacagatgtgacggattatcatattgatcaagtatccaatttagttgagtgtttatctgatgaattttgtctggatgaaaaaaaagaattgtccgagaaagtcaaacatgcgaagcgacttagtgatgagcggaatttacttcaagatccaaactttagagggatcaatagacaactagaccgtggctggagaggaagtacggatattaccatccaaggaggcgatgacgtattcaaagagaattacgttacgctattgggtacctttgatgagtgctatccaacgtatttatatcaaaaaatagatgagtcgaaattaaaagcctatacccgttaccaattaagagggtatatcgaagatagtcaagacatagaaatctatttaattcgctacaatgccaaacacgaaacagtaaatgtgccaggtacgggttccttatggccgctttcagccccaagtccaatcggaaaatgtgcccatcattcccatcatttctccttggacattgatgttggatgtacagacttaaatgaggacttaggtgtatgggtgatattcaagattaagacgcaagatggccatgcaagactaggaaatctagaatttctcgaagagaaaccattagtaggagaagcactagctcgtgtgaaaagagcggagaaaaaatggagaggcaaacgtgaaaaattggaatgggaaacaaatattgtttataaagaggcaaaagaatctgtagatgctttatttgtaaactctcaatatgatagattacaagcggataccaacatcgcgatgattcatgcggcagataaacgcgttcatagcattcgagaagcttatctgcctgagctgtctgtgattccgggtgtcaatgcggctatttttgaagaattagaagggcgtattttcactgcattctccctatatgatgcgagaaatgtcattaaaaatggtgattttaataatggcttatcctgctggaacgtgaaagggcatgtggatgtagaagaacaaaacaaccaccgttcggtccttgttgttccggaatgggaagcagaagtgtcacaagaagttcgtgtctgtccgggtcgtggctatatccttcgtgtcacagcgtacaaggagggatatggagaaggttgcgtaaccattcatgagatcgagaacaatacagacgaactgaagtttagcaactgtgtagaagaggaagtatatccaaacaacacggtaacgtgtaatgattatactgcgactcaagaagaatatgagggtacgtacacttctcgtaatcgaggatatgacggagcctatgaaagcaattcttctgtaccagctgattatgcatcagcctatgaagaaaaagcatatacagatggacgaagagacaatccttgtgaatctaacagaggatatggggattacacaccactaccagctggctatgtgacaaaagaattagagtacttcccagaaaccgataaggtatggattgagatcggagaaacggaaggaacattcattgtggatagcgtggaattacttcttatggaggaataa

SEQ ID NO: 269 - DNA, 3687 bp, Bacillus thuringiensis
  source 1..3687: mol_type = genomic DNA
atgacttcaaataggaaaaatgagaatgaaattataaatgctgtatcgaatcattccgcacaaatggatctattaccagatgctcgtattgaggatagcttgtgtatagccgaggggaacaatatcgatccatttgttagcgcatcaacagtccaaacgggtattaacatagctggtagaatactaggcgtattgggcgtaccgtttgctggacaactagctagtttttatagttttcttgttggtgaattatggccccgcggcagagatcagtgggaaattttcctagaacatgtcgaacaacttataaatcaacaaataacagaaaatgctaggaatacggctcttgctcgattacaaggtttaggagattccttcagagcctatcaacagtcacttgaagattggctagaaaaccgtgatgatgcaagaacgagaagtgttctttatacccaatatatagctttagaacttgattttcttaatgcgatgccgcttttcgcaattagaaaccaagaagttccattattgatggtatatgctcaagctgcaaatttacacctattattattgagagatgcctctctttttggtagtgaatttgggcttacatcgcaggaaattcaacgctattatgagcgccaagtggaacgaacgagagattattccgactattgcgtagaatggtataatacaggtctaaatagcttgagagggacaaatgccgcaagttgggtacggtataatcaattccgtagaggtctaacgttaggagtattaggtctagtggcactattcccaagctatgacactcgcacttatccaataaatacgagtgctcagttaacaagagaagtttatacagacgcaattggagcaacaggggtaaatatggcaagtatgaattggtataataataatgcaccttcgttctctgccatagaggctgcggctatccgaagcccgcatctacttgattttctagaacaacttacaatttttagcgcttcatcacgatggagtaatactaggcatatgacttattggcgggggcacacgattcaatctcggccaataggaggcggattaaatacctcaacgcatggggctaccaatacttctattaatcctgtaacattacggttcgcatctcgagacgtttataggactgaatcatatgcaggagtgcttctatggggaatttaccttgaacctattcatggtgtccctactgttaggtttaattttacgaaccctcagaatatttctgatagaggtaccgctaactatagtcaaccttatgagtcacctgggcttcaattaaaagattcagaaactgaattaccaccagaaacaacagaacgaccaaattatgaatcttacagtcacaggttatctcatataggtataattttacaatccagggtgaatgtaccggtatattcttggacgcatcgtagtgcagatcgtacgaatacgattggaccaaatagaatcacccaaatcccaatggtaaaagcatccgaacttcctcaaggtaccactgttgttagaggaccaggatttactggtggggatattcttcgaagaacgaatactggtggatttggaccgataagagtaactgttaacggaccattaacacaaagatatcgtataggattccgctatgcttcaactgtagattttgatttctttgcatcacgtggaggtactactgtaaataattttagattcctacgtacaatgaacagtggagacgaactaaaatacggaaattttgtgagacgtgcttttactacaccttttacttttacacaaattcaaaatataattcgaacgtctattcaaggccttagtggaaatggggaagtgtatatagataaaattgaaattattccagttactgcaaccttcgaagcagaatatgatttagaaagagcgcaagaggcggtgaatgctctgtttactaatacgaatccaagaagattgaaaacagatgtgacagattatcatattgatcaagtatccaatttagtggcgtgtctatcggatgaattctgcttggatgaaaagagagaattacttgagaaagtgaaatatgcgaaacgactcagtgatgaaagaaacttactccaagatccaaacttcacatccatcaataagcaaccagacttcatatctactaatgagcaatcgaatttcacatctatccatgaacaatctgaacatggatggtggggaagtgagaacattaccatccaggaaggaaatgacgtatctaaagagaattacgtcacactaccgggtacttttaatgagtgttatccgacgtatttatatcaaaaaataggggagtcggaattaaaagcttatactcgctaccaattagaaggttatattgaagatagtcaagatttagagatatatttgattcgttataatgcgaaacatgaaacattggatgttccaggtaccgagtccctatggccgctttcagttgaaagcccaatcggaaggtgcggagaaccgaatcgatgcgcaccacattttgaatggaatcctgatctagattgttcctgcagagatggagaaaaatgtgcgcatcattcccatcatttctctttggatattgatgttggatgcacagacttgcatgagaatctaggcgtgtgggtggtattcaagattaagacgcaggaaggtcatgcaagactagggaatctggaatttattgaagagaaaccattattaggagaagcactgtctcgtgtgaagagggcagagaaaaaatggagagacaaacgtgaaaaactacaattggaaacaaaacgagtatatacagaggcaaaagaagctgtggatgctttattcgtagattctcaatatgatagattacaagcggatacaaacatcggcatgattcatgcggcagataaacttgttcatcgaattcgagaggcgtatctttcagaattacctgttatcccaggtgtaaatgcggaaatttttgaagaattagaaggtcacattatcactgcaatctccttatacgatgcgagaaatgtcgttaaaaatggtgattttaataatggattaacatgttggaatgtaaaagggcatgtagatgtacaacagagccatcatcgttctgaccttgttatcccagaatgggaagcagaagtgtcacaagcagttcgcgtctgtccggggtgtggctatatccttagtgtcacagcgtacaaagagggatatggagagggctgcgtaacgatccatgaaatcgagaacaatacagacgaactaaaatttaaaaaccgtgaagaagaggaagtgtatccaacggatacaggaacgtgtaatgattatactgcacaccaaggtacagctggatgcgcagatgcatgtaattcccgtaatgctggatatgaggatgcatatgaagttgatactacagcatctgttaattacaaaccgacttatgaagaagaaacgtatacagatgtaagaagagataatcattgtgaatatgacagagggtatgtcaattatccaccagtaccagctggttatgtgacaaaagaattagaatacttcccagaaacagatacagtatggattgagattggagaaacggaaggaaagtttatggtagatagcgtggaattactcctcatggaagaatag

SEQ ID NO: 270 - DNA, 3531 bp, Bacillus thuringiensis
  source 1..3531: mol_type = genomic DNA
atggagaataatattcaaaatcaatgcgtaccttacaattgtttaagtaatcctgaggagatacttttagatggagaaagaatatcaactggtaattcatcaattgatatctctctgtcacttgtccagcttctggtatctaactttgtaccagggggaggatttttagttggattattagattttgtatggggaatagtaggcccttctccatgggatgcatttctagtgcaaattgaacaattaattaatgaaagaatagctgcatatgctaggtctgcagcaatttctaatttagaaggattaggaaacaatttcaatatatatgtggaagcatttaaagaatgggaagcagatcctgataatccagtaaccaggactagagtagttgatcgctttcgtatacttgatgggctacttgaaagggacatcccttcatttcgaattgctggatttgaagtaccccttttatccgtttatgctcaagcggccaatttgcatctagctatattaagagattcttcaatttttggagcaagatggggattgacaacaataaatgtcaatgaaaactataataggctaattaggcatattgatgaatatgctaatcactgtgcagatacgtataatcggggataaaataatttaccaaaatctacgtatcaagattggataacatataatcgattacggagagacttaacattaactgtattagatatcgctgctttctttccaagctatgacaataggagatatccaattcagtcagttggtcaactaacaagggaaatttatacggacccattaattacttttaatccacagttacagtctgtagctcaattacctacttttaacgttatggaaagcaacgcaattagaactcctcatttatttgatgtattgaataatcttacaatttttacagattggtttagtgttggacgcaacttttattggggaggacatcgagtaatatctaaccgtataggaggaggtaacataacatctcctatatatggaagagaggcgaatcaggagcctccaagatcttttacttttaatgggcctgtttttaggactttatcaaatcctacttttagacctttacagcaaccttggccagcgccaccatttaatttacgtggtgttgaaggagtagaattttctacacctttaaatagctttacgtatcgaggaagaggtacggttgattctttaactgagttaccgcctgaggataatagtgtgcctcctcgcgaaggatatagtcatcgtttatgtcatgcaacttttgttcaaagatctggaaccccatttttaacaactggtccagtattttcttggacgcatcgtagtgctactgatcgaaatataatctacccggatgtaattaaccaaataccgttagtaaaagcattcaaccttacttcaggtacctctgtagtcagaggtccaggatttacaggaggggatatcatccgaactaacgttaatggtagtgtactaagtatgagtcttaattttagtaacacaacattacagcagtatcgtgtgtgagttcgttatgctgcttctcaaacaatggtcatgagcgtaactgttggagggagtactactggtaatcaaggattccctagtactatgagtgcaaatggggctttgacatctcaatcatttagattcgcagaatttcctgtaggtattagtgcatctggcagtcaaggtgcatcaataagtattagtaataatgtaggtagacaaatgtttcacttagatagaattgaatttctcccagttacttctacatttgaggaggaatatgatttagaaagagcgcaagaggcggtgaatgccctgtttacttctacgaaccaactagggctaaaaacagatgtaacggattatcatattgatcaagtatcaaatctagttgaatgcttatcggatgaattttgtctggatgaaaagcgagaattgtctgagaaagtcaaacatgcgaagcgactcagcgatgagcgcaatttactccaggatcgaaatttcagatccattaatgggcaactaggccgtggctggagaggaagtacggatattaccatccaaggtggagatgacgtattcaaagagaattacgtcacactgccgggtacctttgatgagtgctatccaacgtatctatatcaaaaaatagatgaatcgaaattaaaatcctatacacgttacgagttaagagggtatatcgaggatagtcaagatttagaaatctatttgattcgctacaatgcaaaacacgaaatagtaaatgtaccaggtacagggagtttatggcctctttctatagaaaattcaattgggccttgtggagaaccgaatcgctgcgcgccacaccttgaatggaatcctaatctagattgttcctgcagggacggggaaaaatgtgcccatcattcccatcatttctccttggacattgatgttggatgtacagacttaaatgaggacttaggtgtatgggtgatcttcaagattaagacgcaagatggccatgcaagactaggaaatctagagtttctcgaagagaaaccactattaggggaagcactagctcgtgtgaaaagagcggagaagaaatggagagacaaacgtgaaaaattggaatgggaaacaaatattgtttataaagaggcaaaagaatctgtagatgctttatttgtgaactctcaatatgatagattacaagcggatacgaatatcgcgatgattcatgcggcagataaacgcgttcatagaattagagaagcataccttccagaattatctgtaattccgggtgtaaatgcgggcattttcgaagaattagagggacgcattttcacagcctactctctatatgatgcgagaaatgtcattaaaaatggcgatttcaataatggtttattatgctggaacttgaaagggcatgtagatgtagaagaacaaaacaaccatcgttcagtccttgttgtcccggaatgggaagcggaggtgtcccaagaagttcgtgtctgtccaggtcgtggctatatccttcgtgttacagcgtacaaagagggatatggagagggctgcgtaaccattcatgagatcgaagacaatacagacgaactgaaatttagcaactgtgttgaagaggaagtatatccaaacaacacggtaacgtgtaatgattatactgcgactcaagaagaatacgggggtgcgtacacttcccgtaatcatggatatggcaaatcttatgaaagtaattcttccgtacaagctgattatgcgtcagtttatgaagaaaaagcggacacagatggacgaagagataatcattgcgaatctaacagagggtatggggattacacgccactaccagctggttatgtaacaaaagaattagaatacttcccagaaaccgataaggtatgggttgagattggagaaacggaaggaacattcattgtggatagtgtggaattactccttatggaggaataa

SEQ ID NO: 271 - DNA, 8373 bp, Bacillus thuringiensis
  source 1..8373: mol_type = genomic DNA
tgaaaaataaatttattatttgagaaataaaatcacttgaactcttgtcgcaaatgctaaagcctgagaattggatactatcagaaaacatgcaaatgaaaggtgaaggactcatagagattttgggaaatagttattttaaacaattcattaaattggaagatgattcaacctattttctaagactatctttcaagggaacaggtagggtacccatgattgatgaatctagttatttagttttcgcaaatgttaaggatgaaaattttactagagttattaaaaaatttgtcttcaaagggtgagtgttttattggtatttatggtacctatgtagaaaatgcaagtattatttttctaatgtatttattgttaaagagtagaaaagatataatatttaattatacaaaaattaatagaataccttttgaaagtaatattattccaaaaggaaaaagtttttttatttgtacacgctgataaaagaaagatttcttataatattgcattcagttatcatcgagataaacttgaatcattacttttagaaaagttagctccccggtccttattctccatgtaattaaggtcttgaactatccccactttcacttcgtttagaagtgagggattcctaagtaaagagttctatcgaactctaattgattaggctaaccccgcagtccttgcggttagaagccttattgcttcattctttagattgatactcgcgttaatatccctatcatggtttgtacgacaagaaggacagtcccattcacgtaggtttagatttttaacgtctttattttgatatccacaacaagaacgtaattggctggaagcaaatgttttcgatacgacaatgacttgtttgccataccattttgctttgtattctaacatgaatcgaaattgcgaccaagatacctcaataattgcttttgctaacttatgattttttaacatattcgatacttgcaaatcctctataccgataacatcgtggtttttgatgatttcagttgaaattttgtccaagtaatcttttctagtatttgatatgaattctagctatctttactctttgtttattccagcgagaagatcctttcattcttctagaaagaacacgctgtgttttcggaagttcttgtacttctgtttcaactaatagtgacacaaaatatctaccagaaggggttcgtctaacagtcgcatttacaatacgcccctctacttcgcgacttttagcaaatcgaacaaggcctagtttcggtaactttattttgttccctacaacggcaatgttttcatttgtttgttttgtggtataagattgtacgttgttcttcttagatttaaaacgcggtgcgctgttttgttttttgaaaagcgtgtataagcatccgcaaggttgcgaacagacgactgaatcgcaatactatccacttcttttagccaaacaagctctttcttcatggcaggtagtttggcagagaatgtaccataggtcaagccttttcctgtctctttgtatacttgatcccataaggataggaaatgattgaatacaaagcgagaacacccaatcgttttgttgattagaattgcttgtgcctgatttggatagatacgaaacttataggctttattcatcattatgtaattcacctccatttcggtatatgactattatacaccgaacatacattcgatagatagtggagtaacactttctgtatatctaacaattaagatggcttcctgccatcccttgttcgaattcatctcccacctactcactgggctgtggcccttcacgctccttgaggaaggagtcttcttggctaaaataataaatagatctgttttaatataagggatttgtgcccttctcgttatattcttttattagccccaaaaactagtgcaactaaatatttttataattacactgattaaatactttatttttgggagtaagatttatgctgaaatgtaataaaattcgttccattttctgtattttctcataaaatgtttcatatgctttaaattgtagtaaagaaaaacagtacaaacttaaaaggactttagtaatttaataaaaaaaggggatagtttatggaaataaataatcaaaaccaatgtgtgccttacaattgtttaagtaatcctaaggagataatattaggcgaggaaaggctagaaacagggaatactgtagcagacatttcattagggcttattaattttctatattctaattttgtaccaggaggaggatttatagtaggtttactagaattaatatggggatttatagggccttcgcaatgggatatttttttagctcaaattgagcaattgattagtcaaagaatagaagaatttgctaggaatcaggcaatttcaagattggaggggctaagcaatctttataaggtctatgttagagcgtttagcgactgggagaaagatcctactaatcctgctttaagggaagaaatgcgtatacaatttaatgacatgaatagtgctctcataacggctattccactttttagagttcaaaattatgaagttgctcttttatctgtatatgttcaagccgcaaacttacatttatctattttaagggatgtttcagttttcggagaaagatggggatatgatacagcgactatcaataatcgctatagtgatctgactagccttattcatgtttatactaaccattgtgtggatacgtataatcagggattaaggcgtttggaaggtcgttttcttagcgattggattgtatataatcgtttccggagacaattgacaatttcagtattagatattgttgcgttttttccaaattatgatattagaacatatccaattcaaacagctactcagctaacgagggaagtctatctggatttaccttttattaatgaaaatctttctcctgcagcaagctatccaaccttttcagctgctgaaagtgctataattagaagtcctcatttagtagactttttaaatagctttaccatttatacagatagtctggcacgttatgcatattggggagggcacttggtaaattctttccgcacaggaaccactactaatttgataagatcccctttatatggaagggaaggaaatacagagcgccccgtaactattaccgcatcacctagcgtaccaatatttagaacactttcatatattacaggccttgacaattcaaatcctgtagctggaatcgagggagtggaattccaaaatactataagtagaagtatctatcgtaaaagcggtccaatagattcttttagtgaattaccacctcaagatgccagcgtatctcctgcaattgggtatagtcaccgtttatgccatgcaacatttttagaacggattagtggaccaagaatagcaggcaccgtattttcttggacacaccgtagtgccagccctactaatgaagtaagtccatctagaattacacaaattccatgggtaaaggcgcatactcttgcatctggtgcctccgtcattaaaggtcctggatttacaggtggagatattctgactaggaatagtatgggcgagctggggaccttacgagtaaccttcacaggaagattaccacaaagttattatatacgtttccgttatgcttcggtagcaaataggagtggtacatttagatattcacagccaccttcgtatggaatttcatttccaaaaactatggacgcaggtgaaccactaacatctcgttcgttcgctcatacaacactcttcactccaataaccttttcacgagctcaagaagaatttgatctatacatccaatcgggtgtttatatagatcgaattgaatttataccggttactgcaacatttgaggcagaatatgatttagaaagagcgcaaaaggtggtgaatgccctgtttacgtctacaaaccaactagggctaaaaacagatgtgacggattatcatattgatcaggtatccaatctagttgcgtgtttatcggatgaattttgtctggatgaaaagagagaattgtccgagaaagttaaacatgcaaagcgactcagtgatgagcggaatttacttcaagatccaaacttcagagggatcaataggcaaccagaccgtggctggagaggaagtacggatattactatccaaggaggagatgacgtattcaaagagaattacgttacgctaccgggtacctttgatgagtgctatccaacgtatttatatcaaaaaatagatgagtcgaaattaaaagcctatacccgttatcaattaagagggtatatcgaagatagtcaagacttagaaatctatttaattcgttacaatgcaaaacacgaaatagtaaatgtaccaggtacaggaagtttatggcctctttctgtagaaaatcaaattggaccttgtggagaaccgaatcgatgcgcgccacaccttgaatggaatcctgatttacactgttcctgcagagacggggaaaaatgtgcacatcattctcatcatttctctttggacattgatgttggatgtacagacttaaatgaggacttaggtgtatgggtgatattcaagattaagacgcaagatggccacgcacgactagggaatctagagtttctcgaagagaaaccattattaggagaagcactagctcgtgtgaaaagagcggagaaaaaatggagagacaaacgcgaaacattacaattggaaacaactatcgtttataaagaggcaaaagaatctgtagatgctttatttgtaaactctcaatatgatagattacaagcggatacgaacatcgcgatgattcatgcggcagataaacgcgttcatagaattcgagaagcgtatctgccggagctgtctgtgattccgggtgtcaatgcggctatttttgaagaattagaagagcgtattttcactgcattttccctatatgatgcgagaaatattattaaaaatggcgatttcaataatggcttattatgctggaacgtgaaagggcatgtagaggtagaagaacaaaacaatcaccgttcagtcctggttatcccagaatgggaggcagaagtgtcacaagaggttcgtgtctgtccaggtcgtggctatatccttcgtgttacagcgtacaaagagggatatggagaaggttgcgtaacgatccatgagatcgagaacaatacagacgaactgaaattcaacaactgtgtagaagaggaagtatatccaaacaacacggtaacgtgtattaattatactgcgactcaagaagaatatgagggtacgtacacttctcgtaatcgaggatatgacgaagcctatggtaataacccttccgtaccagctgattatgcgtcagtctatgaagaaaaatcgtatacagatagacgaagagagaatccttgtgaatctaacagaggatatggagattacacaccactaccagctggttatgtaacaaaggaattagagtacttcccagagaccgataaggtatggattgagattggagaaacagaaggaacattcatcgtggacagcgtggaattactccttatggaggaataggaccatcccgagtatagcagttttaataaatattaattaaaatagtagtctaacttccgttccaattaaataagtaaattacagttgtaaaaaaaaacggacattactcttcaaagagcgatgtccgttttttatatggtgtgtgctaatgataagtgcgcacgaaattttattgtcaaaatagtatttacttgagaaaaagatcatgttatgtagagatattcccttataatacttgttccacattcataatttttggatgatacattacaacaaaaacagtcgcaaatttatattttctgcataaaatatatagttaagaacctaagaagagaatcaagtagtaggataaaactgaataaggaagtgtagctacaatgaataaaaaaataagaaatgaagatgagcattcatcgatagaattatcatatagtaattcaaaaaatcaaaagcataaggtaccattttgttgtaccatttcaattcctaaaggatgggaagttatatcagaatgccagcccaaaatcgtctatcaacttgattgtctgtctattataaaagaaacgtgtcgcaaagtggttgaggtaaaagattgtggtcaaacggaaatcgatgttaatgtgttaaaaataaaaggatgtatctcttttctgattaatatagaggtgaggccaaaggatgaacgatgtgtttgcttcacagattcccaaaatcaagacatagcattgtgttgtaaagataccgtatgtgtagatcatgtacttcaatgtagtgtggggcatttaccacctcttcatttaaattgtcacaatgtaacagtctgtgatgtaaaagtggtaccggtctgcgatgcggcctgtcaattcgtgaaagtgacagggggttttcaatttcatcctcacttttaaatatcgaggttccgactcccttgtatattgatgattttctcataaaaagtgactataaatataatgttaaagtttgtatatttaatatatttgcagtgggaatggaaaaggggggctttatcatcctttatagcttgtggaaagaggcgaatttaatgggaaattggtttttatttgaagtcctcgatatatgaaacccttcatgtgaatttttaaaaccgtaaccacatttaagaaaaagaaaaatgtttaaactttcatcactataacattaatatttaaatgaagtgggatatattatgcgaaacttcagatagagatagaaaatgaataactaaaaaaattcttacaagatatcattattttaatttgattattgtttctattctgcttattttatgttaaatttaatatgtacatgtaaaatggtttgaaatttagtatgattacatgcaggaaaagagtacgttcgaaaaagaacgtactcttttatatttaccttgattatcttaaaaatataatcatcatttttattaggtataaatttgatatgaaacacatacattcttaaaagtacttgttttttaatagagcaatatagtttgaactatttatttacggtatataaagctgcacgcctacactatacaggatgtatgaaaaaagttttaaaatccacagatatagcaaagtgctcatttgccatatctgtggattttaaaacataggttatgttacaaaaacattataagagattaaccgtcaaagatgtgaaccagatataagccagctagtttttttacgaatgtagtatacccaaacaatttataagacatatgtatacaaaccttaaattcaaagatttattctcaggaactctaaagtatggatgaaagagaaataagccctggttatttaaacggtgaaggaagttcaatatgataaaggaaaatatcagattagaggctctacacaactaaaaaatttggtgaaaaaatataaagaatttagtggaattacagatacttgtgggaaaaatggtggaatgaaaggtgtatcaaattggttaaaagagaaatatccagttatatggtttacgaaatttgcgggtgtacatcgttgaagtattcataccaaaggtatgaaaaatatacggctagaactcgaaaaatgattaaaaaagtaagatctattcacgtaaagcacaaagaatttggttatccacatatgaaaatccctttacaggaagagggatattttataaatcacaagaaagtatatcgcttaaagatggggctaaacatccaatctattattcgaaagaagcgttgcttctttaaagggaactattccaaattttttctgaatgttttaaatcgtgagtttaaagatcgccaacaaaatgaggcacttgttacagatattacttacctacaattccaagaggaatttcggtatctttctgttgtacaaggtgtttataataacgcaggtgtttcttggaaaatatctacgcgtaatgataatgaacttgtattagatacgattgaaatattggcacaaaaaagagacgtgcgtggaaccattctccattcagatcaaggattccagtacacatctcatgcctacaacaaacgactttccgatttaagtatcattggtaactactcccgcaaaggaaactgccataataacgtttgtatcgagtcatttttctcccatttcaaatcggagatgttgtatttgaatcattttaaaacagaagaaaatttaatacaagccaatgaaaaatatatttacttttataactatagacggttcaaaaaacgactcaaccatc

SEQ ID NO: 272 - DNA, 3516 bp, Bacillus thuringiensis
  source 1..3516: mol_type = genomic DNA
atggagatagtgaataatcagaatcaatgcgtgccttataattgtttaaataatcctgaaaatgagatattagatattgaaaggtcaaatagtactgtagcaacaaacatcgccttggagattagtcgtctgctcgcttccgcaactccaataggggggattttattaggattgtttgatgcaatatgggggtctataggcccttcacaatgggatttatttttagagcaaattgagctattgattgaccaaaaaatagaggaattcgctagaaaccaggcaatttctagattagaagggataagcagtctgtacggaatttatacagaagcttttagagagtgggaagcagatcctactaatccagcattaaaagaagagatgcgtactcaatttaatgacatgaacagtattcttgtaacagctattcctcttttttcagttcaaaattatcaagtcccatttttatcagtatatgttcaagctgcaaatttacatttatcggttttgagagatgtttcagtgtttgggcaggcttggggatttgatatagcaacaataaatagtcgttataatgatctgactagacttattcctatatatacagattatgctgtacgctggtacaatacgggattagatcgcttaccacgaactggtgggctgcgaaactgggcaagatttaatcagtttagaagagagttaacaatatcagtattagatattatttcttttttcagaaattacgattctagattatatccaattccaacaagctcccaattaacgcgggaagtatatacagatccggtaattaatataactgactatagagttggccccagcttcgagaatattgagaactcagccattagaagcccccaccttatggacttcttaaataatttgaccattgatacggatttgattagaggtgttcactattgggcagggcatcgtgtaacttctcattttacaggtagttctcaagtgataacaacccctcaatatgggataaccgcaaatgcggaaccaagacgaactattgctcctagtacttttccaggtcttaacctattttatagaacattatcaaatcctttcttccgaagatcagaaaatattactcctaccttagggataaatgtagtacagggagtagggttcattcaaccaaataatgctgaagttctatatagaagtagggggacagtagattctcttaatgagttaccaattgatggtgagaattcattagttggatatagtcatcgattaagtcatgttacactaaccaggtcgttatataatactaatataactagcctgccaacatttgtttggacacatcacagtgctactaatacaaatacaattaatccagatattattacacaaatacctttagtgaaaggatttagacttggtggtggcacctctgtcattaaaggaccaggatttacaggaggggatatccttcgaagaaataccattggtgagtttgtgtctttacaagtcaatattaactcaccaattacccaaagataccgtttaagatttcgttatgcttccagtagggatgcacgaattactgtagcgataggaggacaaattagagtagatatgacccttgaaaaaaccatggaaattggggagagcttaacatctagaacatttagctataccaattttagtaatcctttttcatttagggctaatccagatataattagaatagctgaagaacttcctattcgtggtggtgagctttatatagataaaattgaacttattctagcagatgcaacatttgaagaagaatatgatttggaaagagcacagaaggcggtgaatgccctgtttacttctacaaatcaactagggctaaaaacagatgtgacggattatcatattgatcaagtttccaatttagttgagtgtttatcggatgaattttgtctggatgaaaagagagaattatccgagaaagtcaaacatgcgaagcgactcagtgatgaacggaatttacttcaagatccaaacttcagagggatcaataggcaaccagaccgtggctggagaggaagcacggatattactatccaaggtggagatgacgtattcaaagagaattacgtcacattaccgggtacctttgatgagtgctatccaacgtatttatatcaaaaaatagatgagtcgaagttaaaagcttatacccgctatgaattaagagggtatatcgaggatagtcaagacttagaaatctatttaattcgctacaatgcaaaacacgagacagtaaacgtgccaggtacgggttccttatggccgctttcagcccaaagtccaatcggaaagtgtggagaaccgaatcgatgcgcgccacaccttgaatggaatcctaatctagattgctcctgcagagacggggaaaaatgtgcccatcattcccatcatttctccttggacattgatgttggatgtacagacttaaatgaggacttaggtgtatgggtgatattcaagattaagacacaagatggctatgcaagactaggaaatctagagtttctcgaagagaaaccactattaggggaagcactagctcgtgtgaaaagagcggagaaaaaatggagagacaaatgcgaaaaattggaatgggaaacaaatattgtttataaagaggcaaaagaatctgtagatgctttatttgtaaactctcaatatgatagattacaagcggatacgaatatcgcgatgattcatgcggcagataaacgcgttcatagcattcgagaagcgtatctgccagagctgtctgtgattccgggtgtcaatgcggctatttttgaagaattagaagggcgtattttcactgcattctccctatatgatgcgagaaatgtcattaaaaatggcgatttcaataatggcttatcatgctggaacgtgaaagggcatgtagatgtagaagaacagaacaaccatcgttcggtccttgttgttccagaatgggaagcagaagtgtcacaagaagttcgtgtttgtccgggtcgtggctatatccttcgtgttacagcgtacaaagagggatatggagagggctgtgtaacgattcatgagatcgaagacaatacagacgaactgaaattcagcaactgtgtagaagaggaagtatatccaaacaacacggtaacgtgtaataattatactgcgactcaagaagaacatgagggtacgtacacttcccgtaatcgaggatatgacgaagcctatgaaagcaattcttctgtacatgcgtcagtctatgaagaaaaatcgtatacagatagacgaagagagaatccttgtgaatctaacagaggatatggggattacacaccactaccagctggctatgtgacaaaagaattagagtacttcccagaaaccgataaggtatggattgagatcggagaaacggaaggaacattcatcgtggacagcgtggaattacttcttatggaggaataa

SEQ ID NO: 273 - DNA, 3525 bp, Bacillus thuringiensis
  source 1..3525: mol_type = genomic DNA
atggagaataatattcaaaatcaatgcgtaccttacaattgtttaagtaatcctgaagtagaaatattaagtgaagaaagaagtactggcagattaccgttagatatatccttgtcgcttacacgtttccttttgagtgaatttgttccaggtgtgggagttgcgtttggattatttgatttaatatggggttttataactccttctgaatggagtttatttcttttacagattgaacaactgattgaacaaagaattgaaacattggaaaggaaccgggcaattactacattacgagggttagcggatagctatgaagtttaccttgaggcactaagagagtgggaagaaaatcctaataatgcacaattaagggaagatgtgcgtattcgatttgctaatacagacgacgctttaataacagcaataaataattttacacttacaagttttgaaatccctcttttatcggtctatgttcaagcggcgaatctacatttatcactattaagagatgctgtatcgtttgggcagggttgggggctggatatagctactgttaataatcattataataggttaataaatcttattcatagatatacggaacattgtttggacacatacaatcaaggattagaaaacttaagaggtactaatactcgacaatggtcaagattcaatcagtttaggagagagttaacattgactgtattagatatcgttgctctttttccgaactacgatgctggagcatatccaattcaaacgtcatcccaattaacaagggaaatttatacaagttcagtaattgaagattctccagtttctgctaatatacctaatggttttaatagagcggaatttggagttagaccgccccatcttatggactttatgaattctttgtttgtaactgcagagactgttagaagtcaaactgtgtggggaggacacttagttagttcacgaaatacggctggtaaccctataaatttccctatttatgggatcttcaatcctggtggcgccatttggattgcagatgaggatccacgtcctttttatcggacattatcagatcctgtttttgtccgaggaggatttgggaatcctcattatgtacttgggcttaggggagtagcatttcaacaaactggtacgaaccacacccgaacatttagaaatagtgggaccatagattctctagatgaaatcccacctcaggataatagtggggcaccttggaatgattatagtcatgtattaaatcatgttacatttgtaaggtggcctggtgagattgcaggaagtgattcatggagagcgccaatgttttcttggacacaccgtagtgcagatcgtacaaatatcattaatccaaatataattacacaaatacctgctgtaaaagcacacaatcttcattcgggttctacggttgttagaggacccgggtttacaggtggtgatctcttacgaagaacgaatactggtacatttgcagatataagagtaaatattactgggccattatctcaaagatatcgtgtaagaattcgctatgcttctacgacagatttacaatttttcacgagaatcaatggaacttctgtaaatcaaggtaatttccaaagaactatgaatagagggggtaatttagagtctggaaactttaggactgcaggatttagtacgccttttagtttttcaaatgcgcaaagtacattcacattgggtactcaggctttttcaaatcaggaagtttatatagatcgaattgaatttgtcccggcagaagtaacattcgaggcagaatctgatttagaaagagcgcaaaaggcggtgaatgccctgtttacttctacaagccaactagggctaaaaacaaatgtaacgggttaccatattgatcaagtgtccaatttagttgcgtgtttatcggatgaattttgtctggatgaaaagagagaattgtccgagaaagttaaacatgcgaagcgactcagtgataagcggaatttacttcaagatccaaacttcagagggatcagtaggcaaccagaccatggctggagaggaagtacggatattactatccaaggaggagatgacgtattcaaagagaattacgttacgctaccgggtacttttgatgagtgctatccaacgtatttatatcaaaaaatagatgagtcgaaattaaaagcctatacccgttatcaattaagagggtatatcgaagatagtcaagacttagaaatctatttaattcgttacaattcaaaacacgaaatagtaaatgtaccaggtacagggagtttatggcctctttctgtagaaaatcaaattggaccttgtggagaaccgaatcgatgcgcgccacaccttgaatggaatcctgatttacactgttcctgcagagacggggaaaaatgtgtgcatcattctcatcatttctctttggacattgatgtcggatgtacagatttaaatgaggacctaggtgtatggttgatattcaagattaagacgcaagatggccacgcaagactagggaatctagagtttctcgaagaggaaccgttattaggcgaagcgttagcacgtgtgaagagagcggagaagaagtggagagacaaacgcgagaaactgcagttggaaacaaatattgtctataaagaggcaaaagaatctgtagatgctttatttgtaaactctcaatatgatagattacaagcggatacgaacatcgcgatgattcatgcggcagataaacgcgttcatagaatccgggaagcgtatctgccagagttgtctgtgattccaggtgtcaatgcggccattttcgaagaattagagggacgtatttttacagcgtattccttatatgatgcgagaaatgttattaaaaatggcaatttcaataatggcttattatgctggaacgtgaaagggcatgtagatgtagaagagcaaaacaaccaccgttcggtccttgttatcccagaatgggaagcagaagtgtcacaaaaagttcgtgtctgtccaggtcgtggttatatccttcgtgttacagcgtacaaagagggatatggagaaggtagcgtaacgatccatgagatcgaagacaatacagacgaattaaagtttagcaactgtgtagaagaaggatatccaaacaacacggtaacgtgtaatgagtatactatgaatcaaggggtaggagagtgtacggatgcatgtaatgtccgtaatcgtggatatgaggatgcatatggacacaatccttcaacgcctgttcattacacaacgccgtacgaagaagaaacgtatacagatgaacgaagagagaatccttgtgaagctaacaaagggtatgtgaattacacgccactaccagttggttatgtaacaaaagaattagaatacttcccagaaaccgataaggtatgggttgagattggagaaacggaaggaacattcattgtggatagtgtggaattactccttatggaggaataa

SEQ ID NO: 274 - DNA, 2920 bp, Bacillus thuringiensis
  source 1..2920: mol_type = genomic DNA
atcgatgaaaatatctctgctttttctttctttatttggtatatgctttacttgtaatcgaaaataaagcactaataagagtatttataggtgtttgaagtcatttcagttcatttttaaaggaggtttaaaagtgttagaaagttattaaggaataatacttacagtaaatcctacctatattttacaattaattatgatatttatgcataaattaaaaatgctttatttgacattacagctaagtataattttttatgaataaaattttatttgaaaattaaataatattatatgtgagggattaatatgaaactaaagaatccagataagcatcaaagcttgtctagcaatgcgaaagtagataaaatcgctacggattcactaaaaaatgaaacagatatagaattgaaaaatattaatcatgaggatttcctaagaatgtctgagcatgagagtattgatccgtttgttagtgcatcaacaattcaaacgggtattggaattgctggtaagattcttggtactctaggtgttccttttgctggacaaatagctagcctctatagttttatcttaggcgagctttggcctaaagggaaaagtcaatgggaaatctttatggaacatgtagaagagcttattgaccaaaaaatatcaacttacgcaagaaacatagcacttgcagatttaaaaggcttaggagatgctttggctgtctaccatgaatcgcttgaaagttggattaaaaatcgcaacaacgcaagggctacaagtgttgtcaagagccaatatattgctttagaactattgtttgttcaaaagctgccttcttttgcagtatcaggtgaggaagtaccattattgccaatatatgcacaagctgcaaatttacacttattattactaagagatgcttctgtttttggaaaagagtggggattatctaattcgcaaatttctacattttataatcgtcaagtcgaaagaacgagtgactattccgaccattgtgtgaaatggtatagtacaggtctaaataacttgagaggtacaaatgccgaaagctgggtccgttataatcaatttcgtaaagatatgacattaatggtactagatttaatcgcattattcccaagctatgatacacttgtatatccaattaaaaccacttctcaacttacaagagaagtatatacagacgcaattgggacagtacatccaaatgcaagttttgcaagtacgacctggtataataataatgcaccttcgttctctgccatagagtctgctgttgttcgaaacccgcatctactcgattttttagaacaagttacaatttacagcttattaagtaggtggagtaacactcagtatatgaatatgtggggaggacatagactggaattccgaacaataggtggagtgttaaatacctcaacacaagggtctactaatacttctattaatcctgtaacattaccgttcacgtctcgagacgtctataggactgaatcattggcagggctgaatctatttttaactcaacctgttaatggagtacctagggttgattttcattggaaattcgccacacttccgattgcatctgataatttttattatctagggtatgctggagttggtacgcaattacaagattcagaaaatgaattaccacctgaaacaacaggacagccaaattatgaatcatatagtcatagattatcccatataggactcatttcagcatcccacgtgaaagcattggtatattcttggacacatcgtagtgcagatcgtacaaatacaattgagccaaatagcattacacaaataccattagtaaaagcgttcaatctgtcttcaggtgccgctgtagtgagaggaccaggatttacaggtggggatatccttcgaagaacgaatactggtacatttggggatatacgagtaaatattaatccaccatttgcacaaagatatcgcgtgaggattcgctatgcttctactacagatttacaattccatacgtcaattaacggtaaagctattaatcaaggtaatttttcagcaactatgaatagaggagaggacttagactataaaacctttagaactgtaggctttaccactccatttagcttttcagatgtacaaagtacattcacaataggtgcttggaacttctcttcaggtaacgaagtttatatagatcgaattgaatttgttccggtagaagtaacatatgaggcagaatatgattttgaaaaagcgcaagagaaggttactgcactgtttacatctacgaatccaagaggattaaaaacagatgtaaaggattatcatattgaccaggtatcaaatttagtagagtctctatcagatgaattctatcttgatgaaaagagagaattattcgagatagttaaatacgcgaagcaaatccatattgagcgtaacatgtagaattaaaatctacctaaatccagaaaaataaaagggttaaatatacaattcttgtaccaatattttgagtgattagatgtaggatgaaatttaattgtatgctatttaacagtagagatattaaaaattaatttatctatacattaatagtatagacatacaaacataagagagcattgtcttttcgtaggctacaatgctctctatttactatttatttttcttttgtatcttcaaattgacgttgttctaagcgttctattgcagctcgtcgtttagtatcatcaatgtttgtataaagagatgttgtttccatagaattatgtcccatttgatttgctaataatactaaatctttattttcattatagtgattagtagcataagtatgacgtaatttatgagggcttttcttttcatcaaaagcccttgtgtatttctctgtaagctt

SEQ ID NO: 275 - DNA, 4623 bp, Bacillus thuringiensis
  source 1..4623: mol_type = genomic DNA
tcaatttaaatatttcattttgaatataataaaactaaataatatgaagtttagaatattaatgttatgagctgctatcaaaaggaaagctgctatcaaaaggaaagcaataatgaagaataaataatagcttatatttttaggaaggccaaaagataagctattaaaacatactgaattcattctaaatataggtaatatatttatatttaataaaattcgttgcattttgtgaatattttcataagctgaaccatatgatttaaactggggccaagataaatggcccaaagttataaaggcatatgtgctaaagtccaaaaaacgggaggtaaatcatcaaaaaaatcgtactatacaattttcttaggtaatgctgtgttaaaactaatcagtggagaaaagttaaataggttgtaatgtaagcacaacgtaaaaggaggagttatattgaattcaaataggaaaaatgagaatgaaattataaatgctttatcgattccagctgtatcgaatcattccgcacaaatggatctatcaccagatgctcgcattgaggatagcttgtgtgtagccgaggggaacaatattgatccatttgttagcgcatcaacagtccaaacaggtattagtatagctggtagaatattaggcgtattaggggtgccgtttgccggacaactagctagtttttatagttttcttgttggggaattatggcctagcggcagagatccatgggaaatttttatggaacatgtcgaacaaattgtaagacaacaacaaataacggacagtgttagggataccgctattgctcgtttagaaggtctaggaagagggtatagatcttaccagcaggctcttgaaacttggttagataaccgaaatgatgcaagatcaagaagcattattcgtgagagatatattgctttagaacttgacattactactgctataccgcttttcagcatacgaaacgaagaggttccattattaatggtatatgctcaagctgcaaatttacacctattattattgagagacgcatccctttttggtagtgaatgggggatgtcatctgccgatgttaaccaatattaccaagaacaaatcagatatacagaggaatattctaaccattgcgtacaatggtataatacagggctaaatagattaagagggacaactgccgaaacttgggtacggtataatcaattccgtagagacctaacattaggtgtattagatttagtggcactattcccaagctatgacactcggacttatcccattccaactaccgcccaacttacaagagaagtgtatacagatccaaacggtgttgtagcaggacccaataatagttggtttagaaatggagcttcgttttccgctatagaaaacgcaattattcgacaacctcacctatatgattttctaacgaaccttacaatttacacgagaagaagtcaagtaggcactacaattatgaatttgtgggcagggcatagaatcacgtttaatagaatacaaggtggttctactagtgaaatggtgtatggggctattactaacccagttagtgttagtgacataccatttgtcaatcgggatgtttaccgaactgtatcattagctggtgggcttggctctctgagtggaatacgttatggtttaactagagttgattttgatatgatatttcgtaaccatcctgatatagtaactggattattttatcatccgggacacgcgggcattgcaacccaagtaaaagattcagacacagaattaccacctgaaacgacagaacagccaaattatagagcatttagtcatctactaagtcatatttcaatgggtccaacgactcaagacgtacctccagtatattcttggacacaccagagtgcagatcgtacgaatacaatcaattcggataggataacacaaataccattggtaaaggcgcataccctccaatcgggtaccactgtagtaaaagggccagggtttacaggaggggatatcctccgtcgaacaagtggaggaccatttgcttttagtaatgttaatctagattttaacttgtcacaaaggtatcgtgctagaattcgttatgcctctactactaacctaagaatttacgtaacggttgcaggtgaacgaatttttgctggtcaatttgacaaaacgatggatgctggtgccccattaacattccaatcttttagttacgcaactattaatacagcttttacattcccagaaagatcgagcagcttgactataggtgccgatacgtttagttcaggtaatgaagtttatgtagatagatttgaattaatccaagttactgcaaccttcgaggcagaatctgatttagaaagagcgcggaaggcggtgaatgccttgtttacttctacaaatccaagaggattaaaaacagatgtaacagattatcatatcgaccaagtatccaatctagtagagtgtttatcagatgaattctgcttggataaaaagagagaattactcgaagaagttaaatatgcaaagcgacttagtgatgagcggaatttactccaagatccgacttttacatccattagtggccaaacagaccgtggatggataggaagcactggtattagcattcaaggaggcgatgacatattcaaagaaaattatgtgagactaccaggtaccgttgacgagtgctatccaacgtatttgtatcaaaaaatagatgagtcacaattaaaatcttatactcgctatcaattaagaggctatatcgaagatagtcaagatttagagatttatttgattcgttacaatgcgaaacatgaaacattaagtgtgccaggtactgagtccccatggccatcttcaggagtatatccaagtggaaggtgcggagaaccgaatcgatgtgcaccacgaatcgaatggaatcccgatctagactgttcttgcagatatggagagaaatgcgttcatcattcccatcatttctccttggatattgatgttggatgtacagatttgaatgaggatctaggcgtatgggtgatatttaagattaagacacaagatggccatgcgaaactaggaaatctagaattcatcgaagagaaaccattattaggaaaagcgctgtcccgtgtgaagagagccgagaaaaaatggagagacaaatatgaaaaactacagttggagacaaaacgagtatatacagaggcaaaagaatctgtggatgctttatttgtagactctcaatatgataaattgcaagctaatacgaacatcgggataatccatggggcagataaacaggttcatcgaatccgagaaccgtatctttcagaattacctgtcattccgagtatcaatgcggccatttttgaagaattagagggccatattttcaaagcgtattctctatatgatgcaagaaatgtcataaaaaatggcgatttcaataatggtttatcgtgttggaacgtaaaagggcatgtagatgtacaacagaaccatcatcgttcggtccttgttctctcagaatgggaagcagaagtgtcacaaaaggtacgcgtatgtccagatcgaggctatatccttcgtgtcacagcgtataaagagggatatggagagggatgcgtaacgattcatgaattcgaagataatacggatgtactgaagtttagaaactttgtagaagaggaagtatatccaaacaacacggtaacgtgtaatgattatactacgaatcaaagtgcagaaggatctacggatgcatgtaattcctataatcgtggatatgaggatggatatgagaatagatatgaacccaatccttcagcaccagttaattacacaccgacgtacgaagaaggaatgtatacagatacacagggatataatcattgtgtatctgatcgaggatataggaatcatacaccattaccagctggttatgtaacactagaattagagtatttcccagaaacagagcaagtatggatagaaattggagaaacggaaggaacatttatcgtaggtagcgtggaattactccttatggaggaataggatacgttttaaagtgaaacgtatgcaaataaagaatgatcgctggcctatattgacagataaataaggaaattaatatatgaacaaaaacggacatcactcttaagggtatgatgtccgttttttatatgatttggtttaaagattgatatgtaaatatatttttttacgaaggctttacataaaaaagaatctttatagcaaaatttaaaattaaatcttacatatagctggattgaaaataaagcaaacttattaattgaattatataaaaagattaaatgctattcaagatcttaacattttgttaaatctacttcattaacgttacttaaatgtattttataataatatttagtaacttgtattggtattttaaattttttgattattaaaagacgttaaatataaaaacagaaagaaggaatgaatttggataataactccttattgaaaagtatgcattgagattataaaaactaaaatcgtggtattttttataataacaaccatgttttttttcat

SEQ ID NO: 276 - DNA, 1902 bp, Bacillus thuringiensis
  source 1..1902: mol_type = genomic DNA
atgaatagtgtattgaatagcggaagaactaccattcgtgatgcgtataatgtagtggctcatgatccatttagttttcaacacaaatcattagataccatacaaaacgaatggacggagtggaaaaaaaataatcatagtttatatgtagatcctattgttggaactgtggctagttttctgttaaagaaagtggggagtcttattggaaaaaggatactaagtgagttacggaatttaatatttcctagtggcagtacaaatctaatgcaagatattttaagagagacagaaaaattcctgaatcaaagacttaatacagacactcttgcccgtgtaaatgcggaattgacagggatgcaagcaagtgtagaagagtttaatcgacaagtagataattttttgaaccctaaccgaaacgctgttcctttatcaataacttcttcagttaatacaatgcagcaattatttctaaatagattaccccagttccagatgcaaggataccaactgttattattacctttatttgcacaggcagccaatttacatctttcttttattagagatgttattcttaatgcagatgaatggggaatttcagcagcaacattacgtacgtatcgagattacctgaaaaattatacaagagattactctaactattgtataaatacgtatcaaagtgcgtttagaggcttaaacactcgtttacacgatatgctagaatttagaacatatatgtttttgaatgtatttgaatatgtatctatctggtcgttgtttaaatatcaaagtcttctagtatcttccagttcgaatttatattcaagtggtagtggaccacagcagacccaatcatttacttcacaagactggccatttttatactctcttttccaagttaattcaaattatgtgttaaatggttttagtggtgctaggctttctaataccttccctaatatagttggtttacctggttctactacaactcacgcattgcttgctgcaagggtcaattacagtggaggaatttcgtctggtgatataggtgcatcgccgtttaatcaaaattttacttgtagcacatttctctcccctttgttaacgccatttgttaggagttggctagattcaggttcagatcgggagggtgttgccaccgttacaaattggcaaacagaatcctttgagacaactttagggttaaggagtggtgcttttacagctcgcggtaattcaaactatttcccagattattttattcgtaatatttctggagttcctttagttgttagaaatgaagatttaagaagaccgttgcactataatgaaataagaaatatagcaagtccttcaggaacacctggtggagcacgagcttatatggtatctgtgcataacagaaaaaataatatctatgccgttcatgaaaatggttctatgattcatttagcgccaaatgactatacaggatttactatttcgccaatacatgcaactcaagtgaataatcaaacacgaacatttatttctgaaaaatttggaaatcaaggtgattccttaagggttgaacaaagcaacacgacagctcgttatacgcttagagggaatggaaatagttacaatctttatttaagagtatcttccataggaaattccactattcgagttactataaacggtagagtttatactgctttaaatgttaatactactacaaataacgatggagttaatgataatggagctcgtttttcagatattaatatcggtaatgtagtagcaagtagtaatactgatgtaccattagatgtaaatataacattaaactccggcactcaatttgatcttatgaatattatgcttgtgccaactaatatttcaccactttattaa

SEQ ID NO: 277 - DNA, 1952 bp, Bacillus thuringiensis
  source 1..1952: mol_type = genomic DNA
tccatggatgaatccgaacaatcgaagtgaacatgatacaataaaaactactgaaaataatgaggtgccaactaaccatgttcaatatcctttagcggaaactccaaatccaacactagaagatttaaattataaagagtttttaagaatgactgcagataataatacggaagcactagatagctctacaacaaaagatgtcattcaaaaaggcatttccgtagtaggtgatctcctaggcgtagtaggtttcccgtttggtggagcgcttgtttcgttttatacaaactttttaaatactatttggccaagtgaagacccgtggaaggcttttatggaacaagtagaagcattgatggatcagaaaatagctgattatgcaaaaaataaagctcttgcagagttacagggccttcaaaataatgtcgaagattatgtgagtgcattgagttcatggcaaaaaaatcctgtgagttcacgaaatccacatagccaggggcggataagagagctgttttctcaagcagaaagtcattttcgtaattcaatgccttcgtttgcaatttctggatacgaggttctatttctaacaacatatgcacaagctgccaacacacatttatttttactaaaagacgctcaaatttatggagaagaatggggatacgaaaaagaagatattgctgaattttataaaagacaactaaaacttacgcaagaatatactgaccattgtgtcaaatggtataatgttggattagataaattaagaggttcatcttatgaatcttgggtaaactttaaccgttatcgcagagagatgacattaacagtattagatttaattgcactatttccattgtatgatgttcggctatacccaaaagaagttaaaaccgaattaacaagagacgttttaacagatccaattgtcggagtcaacaaccttaggggctatggaacaaccttctctaatatagaaaattatattcgaaaaccacatctatttgactatctgcatagaattcaatttcacacgcggttccaaccaggatattatggaaatgactctttcaattattggtccggtaattatgtttcaactagaccaagcataggatcaaatgatataatcacatctccattctatggaaataaatccagtgaacctgtacaaaatttagaatttaatggagaaaaagtctatagagccgtagcaaatacaaatcttgcggtctggccgtccgctgtatattcaggtgttacaaaagtggaatttagccaatataatgatcaaacagatgaagcaagtacacaaacgtacgactcaaaaagaaatgttggcgcggtcagctgggattctatcgatcaattgcctccagaaacaacagatgaacctctagaaaagggatatagccatcaactcaattatgtaatgtgctttttaatgcagggtagtagaggaacaatcccagtgttaacttggacacataaaagtgtagacttttttaacatgattgattcgaaaaaaattacacaacttccgttagtaaaggcatataagttacaatctggtgcttccgttgtcgcaggtcctaggtttacaggaggagatatcattcaatgcacagaaaatggaagtgcggcaactatttacgttacaccggatgtgtcgtactctcaaaaatatcgagctagaattcattatgcttctacatctcagataacatttacactcagtttagacggggcaccatttaatcaatactatttcgataaaacgataaataaaggagacacattaacgtataattcatttaatttagcaagtttcagcacaccattcgaattatcagggaataacttacaaataggcgtcacaggattaagtgctggagataaagtttatatagacaaaattgaatttattccagtgaattaatgaggatcca

SEQ ID NO: 278 - DNA, 3543 bp, Bacillus thuringiensis
  source 1..3543: mol_type = genomic DNA
atgaatccttatcaaaataaaaatgaatatgaaacattaaatgcttcacaaaaaaaattaaatatatctaataattatacaagatatccaatagaaaatagtccaaaacaattattacaaagtacaaattataaagattggctcaatatgtgtcaacagaatcagcagtatggtggagattttgaaacttttattgatagtggtgaactcagtgcctatactattgtagttgggaccgtactgactggtttcgggttcacaacacccttaggacttgctttaataggttttggtacattaataccagttctttttccagcccaagaccaatctaacacatggagtgactttataacacaaactaaaaatattataaaaaaagaaatagcatcaacgtatataagtaatgctaataaaattttaaacaggtcgtttaatgttatcagcacttatcataatcaccttaaaacatgggagaataatccaaacccacaaaatactcaggatgtaaggacacaaatccagctagttcattaccattttcaaaatgtcattccagagcttgtaaactcttgtcctcctaatcctagtgattgcgattactataacatactagtattatctagttatgcacacgcagcaaacttacatctgactgtattaaatcaagccgtcaaatttgaagcgtatttaaaaaacaatcgacaattcgattatttagagcctttgccaacagcaattgattattatccagtattgactaaagctatagaagattacactaattattgtgtaacaacttataaaaaaggattaaatttaattaaaacgacgcctgatagtaatcttgatggaaatataaactggaacacatacaatacgtatcgaacaaaaatgactactgctgtattagatgttgttgcactctttcctatttatgatgtaggtaaatatccaataggtgtccaatctgaacttactcgagaaatttatcaggtacttaacttcgaagaaagcccctataaatattatgactttcaatatcaagaggattcacttacacgtagaccgcatttatttacttggcttgattctttgaatttttatgaaaaagcgcaaactactcctaataattttttcaccagccattataatatgtttcattacacacttgataatatatcccaaaaatctagtgtttttggaaatcacaatgtaactgataaattaaaagctcttggtttggcaacaaatatttatatttttttattaaatgtcataagcttagataataaatatctaaatgattataataatattagtaaaatggatttttttataactaatggtactagacttttggagaaagaacttacagcaggatctgggcaaataacttatgatgtaaataaaaatattttcgggttaccaattcttaaacgaagagagaatcaaggaaaccctaccctttttccaacatatgataactatagtcatattttatcatttattaaaagtcttagtatccctgcaacatataaaactcaagtgtatacgtttgcttggacacactctagtgttgatcctaaaaatacaatttatacacatttaactacccaaattccagctgtaaaagcgaattcacttgggactgcttctaaggttgttcaaggacctggtcatacaggaggggatttaattgatttcaaagatcatttcaaaattacatgtcaacactcaaattttcaacaatcgtattttataagaattcgttttgcttcaaatggaagcgcaaatactcgagctgttataaatcttagtatcccaggggtagcagaactgggtatggcactcaaccccactttttctggtacagattatacgaatttaaaatataaagattttcagtacttagaattttctaacgaggtgaaatttgctccaaatcaaaacatatctcttgtgtttaatcgttcggatgtatatacaaacacaacagtacttattgataaaattgaatttctgccaattactcgttctataagagaggatagagagaaacaaaaattagaaacagtacaacaaataattaatacattttatgcaaatcctataaaaaacactttacaatcagaacttacagattatgacatagatcaagccgcaaatcttgtggaatgtatttctgaagaattatatccaaaagaaaaaatgctgttattagatgaagttaaaaatgcgaaacaacttagtaaatctcgaaatgtacttcaaaacggggattttgaatcggctacgcttggttggacaacaagtgataatatcacaattcaagaagatgatcctatttttaaagggcattaccttcatatgtctggggcgagagacattgatggtacgatatttccgacctatatattccaaaaaattgatgaatcaaaattaaaaccgtatacacgttacctagtaaggggatttgtaggaagtagtaaagatgtagaactagtggtttcacgctatggggaagaaattgatgccatcatgcatgttccagctgatttaaactatctgtatccttctacctgtgattgtgaagcgtctaatcgttgtgagacgtccgctgtgccggctaacattgggaacacttctgatatgttgtattcatgccaatatgatacagggaaaaagcatgtcgtatgtcaggattcccatcaatttagtttcactattgatacaggggcattagatacaaatgaaaatataggggtttgggtcatgtttaaaatatcttctccagatggatacgcatcattagataatttagaagtaattgaagaagggccaatagatggggaagcactgtcacgcgtgaaacacatggagaagaaatggaacgatcaaatggaagcaaaacgttcggaaacacaacaagcatatgatgtagcgaaacaagccattgatgctttattcacaaatgtacaagatgaggctttacagtttgatacgacactcgctcaaattcagtacgctgagtatttggtacaatcgattccatatgtgtacaatgattggttgtcagatgttccaggtatgaattatgatatctatgtagagttggatgcacgagtggcacaagcgcgttatttgtatgatataagaaatattattaaaaatggtgattttacacaaggggtaatggggtggcatgtaactggaaatgcagacgtacaacaaatagatggtgtttctgtattggttctatttaattggagtgctggcgtatctcaaaatgtccatctccaccataatcatgggtatgtcttaggtgttattgccaaaaaagaaggacctggaaatgggtatgtcacgcttatggattgggaggagaatcaagaaaaattgacgtttacgtcttgtgaagaaggatatattacgaagacagtagatgtattcccagatacagatcgtgtacgaattgagataggcgagaccgaaggttcgttttatatcgaaagcattgatttaatttgcatgaacgagtga

SEQ ID NO: 279 - DNA, 1470 bp, Bacillus thuringiensis
  source 1..1470: mol_type = genomic DNA
atgtttacaagtggtgcgaaaaataggttaaagctagaaacgacagattatgaaatagatcaagtggctaatgctatagaatgtatgtcagatgaacaatattcaaaagaaaaactgatgttatgggatcaagtaaaacatgcaaaataccttagtcagtctcgaaatttgcttcaaaatggtgattttgaagatgtatttcatggatggactacaagtgatcatatgtacattcagtcggataattctacttttaaaggaaattatctgaatatatctggggcgcgagacatatacttaacgatatttccaacatacatttaccaaaaaattgatgaatcaaaattaaaaccgtatacacgttacctagtaaggggatttgtaggaagtagtaaagatgtagaactagtggtttcacgctatggaaaagaaatagatacagtcatgaatgtaccatttgatatcccgtatgtatcttctaggcctgtttgtaatgaattatatgatggtgaacaacaaccgtatccaaatgggaatgtaggatattataatccaatgtcagcttttacgccttcttacacatctgatgctcgtcagtgtatgccagggaaaaaacagatagtctgtcaagattctcatcagtttaagttccatattgatacaggtgaagtagattataatacaaatatagggatttgggtcatgtttaaaatatcttccccagatggatacgcattattagataatttagaagtaattgaagaagggccaatagatggggaagcactgtcacgcgtgaaacacatggagaagaaatggaacgatcaaatggaagcaaaacgttcggaaacacaacaagcatatgatgtagcgaaacaagccattgatgctttattcacaaatgtacaagatgaggctttacagtttgatacgacactcgctcaaattcagtacgctgagtatttggtacaatcgattccatatgtgtacaatgattggttgtcagatgttccaggtatgaattatgacatctatgtagagttggatgcacgagtggcacaagcgcgttatttgtatgatacaagaaatattattaaaaatggtgattttacacaaggggtaatggggtggcatgtaactggaaatgcagacgtacaacaaatagatggtgtttctgtattggttctatctaattggagtgctggcgtatctcaaaatgtccatctccaacataatcatgggtatgtcttacgtgttattgccaaaaaagaagggcctggaaatgggtatgtcacgcttatggattgtgaggagaatcaagaaaaattgacgtttacgtcttgtgaagaaggatatattacgaaaacagtagatgtattcccagatacagattgtgtacgaattgagataggcgaaaccgaaggttcgttttatatcgaaagcattgaattaatttgcatgaacgagtaa

SEQ ID NO: 280 - DNA, 4377 bp, Bacillus thuringiensis
  source 1..4377: mol_type = genomic DNA
atggcaattttaaatgaattatatccatctgtaccttataatgtattggcgtatacgccaccctcttttttacctgatgcgggtacacaagctacacctgctgacttaacagcttatgaacaattgttgaaaaatttagaaaaagggataaatgctggaacttattcgaaagcaatagctgatgtacttaaaggtatttttatagatgatacaataaattatcaaacatatgtaaatattggtttaagtttaattacattagctgtaccggaaattggtatttttacacctttcatcggtttgttttttgctgcattgaataaacatgatgctccacctcctcctaatgcaaaagatatatttgaggctatgaaaccagcgattcaagagatgattgatagaactttaactgcggatgagcaaacatttttaaatggggaaataagtggtttacaaaatttagcagcaagataccagtctacaatggatgatattcaaagccatggaggatttaataaggtagattctggattaattaaaaagtttacagatgaggtactatctttaaatagtttttatacagatcgtttacctgtatttattacagataatacagcggatcgaactttgttaggtcttccttattatgctatacttgcgagcatgcatcttatgttattaagagatataattactaagggtccgacatgggattctaaaattaatttcacaccagatgcaattgattcctttaaaaccgatattaaaaataatataaagctttactctaaaactatttatgacgtatttcagaagggacttgcttcatacggaacgccttctgatttagagtcctttgcaaaaaaacaaaaatatattgaaattatgacaacacattgtttagattttgcaagattgtttcctacttttgatccagatctttatccaacaggatcaggtgatataagtttacaaaaaacacgtagaattctttctccttttatccctatacgtactgcagatgggttaacattaaataatacttcaattgatacttcaaattggcctaattatgaaaatgggaatggcgcgtttccaaacccaaaagaaagaatatcaaaacaattcaaactgtatcctagttggagagcgggacagtacggtgggcttttacaaccttatttatgggcaatagaagtccaagattctgtagagactcgtttgtatgggcagcttccagctgtagatccacaggcagggcctaattatgtttccatagattcttctaatccaatcatacaaataaatatggatacttggaaaacaccaccacaaggtgcgagtgggtggaatacaaatttaatgagaggaagtgtaagcgggttaagttttttacaacgagatggtacgagacttagtgctggtatgggtggtggttttgctgatacaatatatagtctccctgcaactcattatctttcttatctctatggaactccttatcaaacttctgataactattctggtcacgttggtgcattggtaggtgtgagtacgcctcaagaggctactcttcctaatattataggtcaaccagatgaacagggaaatgtatctacaatgggatttccatttgaaaaagcttcttatggaggtacagttgttaaagaatggttaaatggtgcgaatgcgatgaagctttctcctggacaatcgataggtattcctattacaaatgtaacaaaacaaaactatcaagtgcgttgtcgttatgcaagtaatagtgataatcctgttttctttaatgtagatactggtggagcgaatccaattttccaacagataaactttgaatctactgtagatagtaatatgggagtaaaaggagaaaatggcgtctatgtagtcaaatctattgctacaactgataattcttttacagtaaaaattcctgcgaagacgattaatgttcatttaaccaaccaaggttcttctgatatctttttagatcgtattgagtttattccttttaaactaacattatctcctactccaattactttagatccgatgaagaccattacagcttctgtcttaagtgcaactagggcctctgatggcataacaaccatcaatgatccagtagatggaactctactttctttacctatgggtacttccatcgattttagtattcttaatcctactcaaactggaacatatcaagtcagtattctctacaaatcttcatccggcggttttactattactaaagtaacaaatgatcaaaacggacagatggtagattatgcttcaacctcagaactacaatatagcaaccctatttacgtcttgtctagcaatacaggaaacactgtattgaccattggacctgggggatattccggcccagatttactcataaaagaaattagattcaccccagcaactccaaattcatcaaataaaattgatacagattttcagttagttgatgggcaaggcacagtaactatttggaaaagtgataaaattgcatatacactagcagatatagatatacagatttcctttaatcaaaccgcttggcaaagtcctaatattacaccttatttaaatgatgatccagtaggtggaatagcaactttttataatactactggtgaatcccaacattttactaaagatagtctactcttccaaagaggttttaacaatattcgggttaacaatggatttggtggtgccactatttctggtcatatgaaagcaaatgtaattgataatccttcttaaaaattaaggttcattttaaaaacttcaggttacaacgtttactattttaaatttacaaactaagggggccgcgtaatggtactatcacgtatagtcaatcccattttcaccgagcaagaagatttaaataatattataacgcaaatcaatgctctattcgtttctagtacacaagataaattaaaaccaggtgtgagtgattattggatcgaggaaattgtactgaaagtggatgccttatcagatgaggtatttggaacagaaaagaaggctttacgtaaattggtgaatcaggcaaaacgtttaagtaaagcaagaaatcttctgataggcggtagttttgaaaattgggatgcatggtataaagggcaaaaagtagtaagattatcggatcacgaactgttgaagagtgatcatgtattattaccaccaccaggattgtctccatcttatattttccaaaaagtggaggaatctaaattaaaagcaaatacacgttatacggtttctggatttattgcgcatgcaacagatttagaaattgtggtttctcgttatgggcaagaaataaagaaagtggtgcaagttccttatggagaagcattcccattaacatcaagtggaccagtttgttgtatcccacattctacaagtaatggaactttaggcaatccacatttctttagttacagtattgatgtaggtgcattagatgtagacacaaaccctggtattgaattcggtcttcgtattgtaaatccaactggaatggcacgcgtaagcaatttggaaattcgtgaagatcgtccattagcagcaaatgaaatacgacaagtacaacgtgtcgcaagaaattggagaaccgagtatgagaaagaacgtgcggaagtaacaagtttaattcaacctgttatcaatcgaatcaatggattgtatgacaatggaaattggaacggttctattcgttcagatatttcgtatcataatatagacgcgattgtattaccaacgttaccaaagttacgccattggtttatgtcagatagatttagtgaacaaggagatatcatggctaaattccaaggagcattaaatcgtgcgtatgcacaactggaacaaaatacgcttctgcataatggtcattttacaaaagatgcagccaattggacggtagaaggcgatgcacatcaggtagtattagaagatggtagacgtgtattacgattgccagattggtcttcgagtgtgtctcaaacgattgaaatcgagaattttgatccagataaagaatatcaattagtatttcatgggcaaggagaaggaacggttacgttggagcatggagaagaaacaaaatatatagaaacgcatacacatcattttgcgaattttacaacttctcaacgtcaaggactcacgtttgaatcaaataaagtgacagtgaccatttcttcagaagatggagaattcttagtggataatattgcgcttgtagaagtccctatgtttaacaagaatcaaatggtcaatgaaaataaaggtgtaaatataaatagcgatacaagtatgaacaacaatcaa

SEQ ID NO: 281 - DNA, 2097 bp, synthetic construct
  source 1..2097: mol_type = other DNA
atggcaaccatcaacgagctgtacccagtgccctacaatgtactcgctcacccaatcaaggaagtagacgatccttatagttggtctaacttgctgaagggaatccaagagggctgggaggaatggggaaagacgggccagaagaagctctttgaggaccatttgacaattgcgtggaacctgtacaagaccggaaagttagattacttcgcactcactaaggcttcaatcagtctgattggcttcatcccaggagccgaggctgcagtccccttcatcaatatgtttgttgacttcgtttggccaaagttgttcggcgccaacacagaaggaaaggatcaacagctcttcaacgcaatcatggacgctgtgaataagatggtcgataacaagtttctgtcctacaacttgtccacgctcaacaaaaccatagagggcctccaaggaaacttgggcttattccagaatgccatccaggttgctatctgtcaaggatctactcccgagcgcgtcaatttcgaccagaactgcacaccatgcaatcctaaccagccatgcaaggatgacctcgatagagtggccagtcgattcgacaccgctaactcacagtttacccagcatcttcctgaattcaagaatccatggagcgatgagaactccacgcaagaattcaagagaactagcgtcgaactcacacttcctatgtacaccactgtggccacactccaccttctcttgtacgaggggtacatagagttcatgaccaaatggaacttccacaacgaacagtacctcaacaaccttaaggttgagttgcagcaactcatccactcatacagcgagactgtgaggacatcttttcttcagttcttgccaaccctcaataaccggtcaaaatctagcgtcaacgcctacaatcgttacgtgaggaacatgactgttaactgtcttgacatcgctgcaacatggccgaccttcgatactcacaattaccaccaaggtgggaagttggacctcacacggatcatcctttcagataccgccggtccaatcgaggagtacactactggagacaagacctctggtcccgagcactccaacatcactcctaacaatatcttggatacaccgtcccccacctatcagcattctttcgtcagcgtggactccattgtctattctaggaaggagctccagcaacttgatatcgctacttacagcacaaacaactccaataactgccatccttacgggttgagactctcttacaccgacggtagcagatacgattacggagacaaccagcctgatttcactacatccaataacaactattgtcacaattcttacaccgcaccgattactcttgttaacgccagacacttgtacaacgctaaaggaagcctacagaatgtggaatccctcgtggtctctacagttaacgggggtagcgggtcctgcatttgcgacgcatggattaactatttgcgtcccccacaaacctctaagaacgagtccaggcctgaccagaaaatcaacgtgctatacccaattactgagacagtgaacaagggtaccgggggcaatctgggagtaatctcggcttacgttcctatggagttggtgccagagaacgtcattggtgacgtgaacgcagacaccaagttgcctctgacacaattgaaggggttcccattcgagaagtatggtagtgaatacaataaccgtggaatctcgctcgttagagaatggatcaatggaaacaacgcagtcaagctgtccaattcgcagtccgtcgggatacagattaccaatcagactaaacagaagtacgagatccgttgccgatatgcttcaaagggggataacaatgtttacttcaacgtggacttgtctgagaacccctttcgcaatagtatttcattcgggtccacagaatcatctgtggttggcgtccaaggggagaacggcaagtacatcctcaagagtattaccactgtggagatcccagccggatcattctatgtccacattacaaaccagggctcctcagacctgttcttggataggatcgaattcgttcctaagattcagtaa

SEQ ID NO: 282 - DNA, 3393 bp, Bacillus thuringiensis
  source 1..3393: mol_type = genomic DNA
atgattcaaaaaaactatgaaattataggtgcttcaacaaacggcataaccgaattacctgaagattacaacactatagtcagcccctatgatgctccagcatccgttactacaactattgaaattactggaaccatactaagcgatttaggtgtttcaggggcatcatcagttagtttacttttgaataaacttttaaatatattatggccaaataatgccaatactgtgtgggggacattcgcaaaagagaccgctgatcttctaaatgaagtgttatctgtggatgatccagtagtaatagaagcaaatattaatttagaagggctaaaaagcacccttgatttatatttagaggcacttaaagaatggaaaaatgatccccaaaatccagcatcccaagagcgtgtcagaactagatttcgtaatgtggatgatgattttacacatgatatgccttcctttgctagagctggatatgaaacgaagctattaacagtttatgcacaagctgcaaatcttcatttacttttattaagagatgcttctatgtttggagaaggttggggaatgtctcaagtaaacataaatgataactataatcgccaattacgattgacggctcaatatacggatcatagtgtaaagtggtataacgcaggactagaaaaattaaaagggaattcaactagggaaaattggtatacttgtaatagatttcagagagaaatgacgttaatggtgttagacgtagttgcattatttccaaactacgatacacgaatgtacccgatcgcaacgtcatcagaacttacaagaatgatttatacagatccaattgcttatacacaaagcgatccatggtacaagataacatctctttctttttcaaatattgaaaacagtgcgattccaagtccatctttcttcaggtggctaaaatccatttcaattaatagccagtggtggggcagtggtcctagtcaaacctactattgggttggacatgaattggtatattctaattcaaattataatcaagcacttaaggttaaatatggagaccccaattcttatattgagccccctgattctttcagcttttcttctaaggatgtttacagaaccatctctgtcgttagaaattcaataagtaattatatagtaagtgaagttcaattcaattagtaatacacataaaattagtgagaaatttataaacatcaatcaaattgggatagaagagaaacaaaagattcaattactgaactatccttagctgctaatcccccaacaacatttggaaatgtagcagaatacagtcatagattagcatatatttcagaggcataccaaagtcacaacccatcaaaatacccaacctacatacctgtattcggttggacgcacacaagcgtacgttacgataataaaatttttccggaaaaaatcactcaaattccagctgttaaaagcccttcagctgaaggttgatcatggcaaaatatagtaaaaggtcccgggtttactgaaggagatgtgacaactgctgtttcgccagcaactgtaaccgacataataaaaatacacgttactctagatccaaattcactttcacaaaaatatcgtgcatgacttcgctatgcttccaatgcatttgtagcagctacattgtatacaaatacaagtagtaattataattttgaacttacagaaagtacaactgaacagtttacaacatataattcatacaagtatgtagatattccaggttcaatacaatttaataatacttctgatacagtgtctgtttatttgcatatggattcaacaactaatgcaaccgttcatgtagatagaattgaattcattccagtagatgaaaattacgataacagagtaagactagaaaaagcacagaaatctgtgactgccttgtttacagcgggaagaaatgcactccaaacggatgtgacagattttaatgtagatcaggtttcaattttagttgattgtataccacgggcattatatcctaatgagaaacgcgaactactaagtttagtcaaatatgcaaaacgtttgagctattcccgtaatttcctcctagatccaacattcaattctatcaattcatcagatgagaatggctggtacggaagtaatggtattgcaattggcagtgggaatattttattcaaagggaactatttaattttctcaggtgccaatgatgaacagtatccaacctatctctatcaaaaaatagacgaatctaagttaaaagaatatacacattataaactgacaggttttatcgagagtagtcaggatttagaagcatacgtgattcgttatgatgcaaaacatcaaacaatggatgtatccaataatctattctcagatattactcctgtaaatgcatgcggagaaccaaatcgttgtgcggcactaccatacctggatgaaaatccaagattagaatgtagttcgatacaagatggtattttatctgattcgcattcgttttctctccatatagatacaggttcaattgatttcaatgagaacgtaggaatttgggtgttgtttaaaatttctacacctgaaggatatgcgagatttggaaacctagaagtgattgaagatggcccagtcattggagaagcattagcccgtgtgaaacgccaagaaacgaagtggagaaacaagttaacacaactgcgaacggaaacacaagcgatttatacacgagcaaaacaagccattgataatttattcacaaatgcacaggactctcacttaaaaataggtgctacatttgcgtcaattgtggctgcaagaaagattgtccaatccatacgtgaagcgtaaatgtcatggttatctatcgtcccaggtgtaaattatcccatttttacagaattgaatgagagagtacagcaagcatttcaattacatgatgtacgaaatgtcgtgtgtaatggccgattccttaatggaacatctgattggattataacctctgacgtaaaggtacaagaagaaaatgggaataacgtattagttctttccaattgggatgcgcaagtattatacaatgcatgaagctctatcaataccacggatatatcttgcgtgtaacggcacgtaaagaaggattgggagaaggatatattacaattacggatgaagaagggcatacagatcaattgacatttggtgcatgtgaggagatagatgcatcctaacacgttcgtatccacaggttatatgacaaaagaactagaatttttcccagatacagagaaggtgcgtatagaaattggagaaacagaagaaatattccaggtggaaagtgtagaattatttttgatgaaagatctatgttaa

SEQ ID NO: 283 - DNA, 3525 bp, Bacillus thuringiensis
  source 1..3525: mol_type = genomic DNA
atgagtccaaataatcaaaatgaatatgaaattctagatgcttcatcatctacttctgtatccgatagttctgttagataccctttagcaaacgatcaaacgaccacattacaaaacatgaactataaagattgtctgagaatgtctgagggagagaatcctgaattatttggaaatccggagacgtttattagttcatctacggttcaaactggaattggcattgttggtcaagtactgggggctttaggggttccatttgctggacagatagctagtttttatagtttcattgtcggtcaattatggccatcaagtaccgtgagtgtatgggaaatgattatgaaacaagtggaagatctaattgatcaaaaaataacagattctgtaaggaaaacagcgcttgcaggactacaaggattaggagatggcttagacgtatatcagaaatcacttaagaattggctggaaaatcgtaatgatacaagagctagaagtgttgtggtgacccaatatatagctttagagcttgattttgttgctaaaatcccatcttttgcaatatctggacaggaagtaccattattatcagtgtatgcacaagcagcgaatttacatttgctattattacgagatgcttccatttttggagcagagtggggattcacaccaggagaaatttccacattttatgatcgtcaggtgacacgtaccgcccaatactcggattattgtgtaaagtggtataacactggcttagataaattaaaaggtacgaatgctgcaagttggctgaagtatcaccaattccgaagagaaatgacattactggtattagatttagtagcgttatttccaaactatgacacacgtacgtatccaatcgaaacaacggcccaacttacacgggaagtgtatacagatccaatagtatttaacagagaaacaagtggtggattttgtaggcgttggtcacttaacagtgatatttctttttcagaagtcgaaagcgctgtaattcgttcaccacacctatttgatatactcagtgaaatagaattttatacaacaagagcggggcttcccttgaataatacggaataccttgaatattgggtaggacattctataaaatataaaaatacgaatgcctcatcagcattagaacgtaattacggtacgattacttctaacaaaatcaagtattatgatttagcaaataaggatatctttcaggttcgatcattaggggcggatttagctaattactacgcacaggtatatggagttccgtacgctagttttacactgcttgacaagaatacaggatcaggatcagttggaggttttacgtactcaaaaccacatacaactatgcaagtatgtacacaaaattacaatacgattgatgaaatccctccagagaatgagccacttagtagagggtatagccatagattatctcatatcacctcttattctttttctaagattgctagtagtcctgctagatatggcaatctccctgtatttgcttggacacatcggagtgcggatgttacaaatacagtttattcagataaaattactcaaattccagttgtaaaagggatcgacctcgggagcacaagtacgattgtaaattttgaatacaatggaggaagtatagtcaaagatactaaatcatcaactcataataactctctttcacgaatagtgagtttaatgataaaaaccgaggatccaaatccaaattcccgctctttatatcgtattagggttaagtatgctgctgatgtgcctggaactttccgactgcatattcaaaatacttccccggttacagtaccctttactgcgacgatgagcggtactaatttacaatacagttcctttaaatatatagaatatataggttactttaataatagagaagttggtttttctattgagtcaagtacatcacagggtagaacacgtaatgtatatatcgacaaaatcgaattcatcccggtagatgcgacatatatagcagaagaagacctagaggtggcaaagaaagctgtgaatggcttgtttacgaatacaaaagatgccttacagacaagtgtaacggattatcaagtgaatcaagcggcaaacttagtagaatgcctatccgatgagttatacccaaatgaaaaacgaatgttatgggatgcagtgaaagaggcgaaacgacttgttcaggcacgtaacttactccaagatacaggctttaataggattaatagagaaaacggatggacgggaagtacgggaattgagattgtggaaggagatgttctgtttaaagatcgttcgcttcgtttgacaagtgcgagagagattgatacagaaacatatccaacgtatctctatcaacaaatagatgaatcacttttaaaaccatatacaagatataaactaaaaggttttataggaagtagtcaagatttagagattaaattaatacgtcatcgggcaaatcaaatcgtcaaaaatgtaccagataatctcttgccagatgtactccctgtcaattcttgtggtgggatcgatcgctgcagtgagcaacagtatgtagacgcgaatttagcactcgaaaacaatggagaaaatggaaatatgtcttctgattcccatgcattttctttccatattgatacaggtgaaatagatttgaatgaaaatacaggaatttgggtcgtatttaaaattccgacaacaaatggatacgcaacactaggaaattttgaattggtagaagaggggccattgtcaggggaaacattagaacgagcacaacaacaagaacaacaatggcaagacaaaatggcaagaaaacgtggggcatcagaaaaagcatattatgcagcaaagcaagccattgatcgtttattcgcagattatcaagaccaaaaacttaattctggtgtagaaatgtcagatatgttggcagcccaaaaccttgtacagtccattccttacgtatataatgatgcgttaccagaaatccctggaatgaactatacgagttttacagagttaacaaatagactccaacaagcatggaatttgtatgatcttcgaaatgctataccaaatggagattttcgaaatggattaagtgattggaatgcaacatcagatgtgaatgtgcaacaactaagcgatacatctgtccttgtcattccaaactggaattctcaagtgtcacaacaatttacagttcaaccgaattatagatatgtgttacgtgtcacagcgagaaaagagggagtaggagacggatatgtgatcatccgtgatggtgcgaatcagacagaaacactcacatttaatatatgtgatgatgatacaggtgttttatctgctgatcaaactagctatatcacaaaaacagtggaattcactccatctacagagcaagtttggattgacatgagtgagaccgaaggtgtattcaacatagaaagtgtagaactcgtgttagaagaagagtaa

SEQ ID NO: 284 - DNA, 3525 bp, Bacillus thuringiensis
  source 1..3525: mol_type = genomic DNA
atgagtccaaataatcaaaatgaatatgaaattatagatatggcaccttctacatctgtaaccaatgattctaacagatacccttttgcgaatgagcccacaaatgcattacaaaatatgaattataaggattatttaagaatgtctgagggatattctcctgaatatttaacaagcctaagtccttacagccagtttggcacagttgataagatcatcagtattattagtctattgaatagtgctgcaggtattcctggtcttgatttttttactggattgctgcaatttattcttgacttctttgcaccagaggatccgtgggcagagttaatggaactagtggaacaactcatagatcaaaaaataacagttgctacaagagaaaaggcgctcgcagaattaagaggactgataaatggataccttgtatatcagcaatcattagaaagttggctggaaaatccaaatgctacaagagctagtatagttcgagaacaatatgtcgctttagaacttgattttgttacttcgatttcatcttttgcgatagctggacaggaagtaccgttattagccgtgtacgcacaagctgctaatttacatttgttattattgagagatgtgtcaatatttggagaagaatggggattaacagtaaatgaggttaataccttctatattcgtcaaatgacttatacaactgagtatagtgattattgtgtaagaatttataatactggcttaaataaattaaaaggatctagtgcatctagttgggttgattataatcgctttcgtagagaaatgaacttactagtactagatattattgcgttatttccaaactatgatgttcgtaggtatccaatggaaacaacaacggaattaacaagagtagtttacactgatccaattgtgtttgacgaaaggaagggggtggcgtcgactcatagttggacggcgattgcaccatctttctcaagtatagaatctctaactcgacgaccaggattatttacatggttagatcaactaactattttttcgaaacgcatatcgcaacctagtgtatttataaatagttgggcggggcataagattagcacctttagaacacaaaaaacagatatactcataaataccacccatggagatactaataatcctataaaagaatttgtagtagataccaaaaaagtagaagatatttatcaaacgatagcatacccacatgcagtagcaaatgaagtattctatttattcggtgtcccaaaagttgattttaatatggtacctgcaggtggctctgcaaactctgcacacaccctcattttttctgatagtacgggagggagactggaaagtattacgaagaactcagaagcagaattacctccaacagagtcattatcagatacacctcaaccaaaccaagtaacttattctcacagattagattatgctacaataattaaagcaaataaaagttatggaagtgggtatattccattattaggttggacccatcggagtgtagatcgtaataatacaatttatccgaataaaatcactcaaataccagcagtaaaagctttctcatatactgaatcatttaatgtaaatgttattgcaggtccaggattcacaggaggagatttaataagtttaggtcatttagagaatatttatatgaaattaaacgttccaaatcctcaaaaattccgtgttcgtattcgttatgctgctagtacaacttcgtatttgcaaataactgggctatctaatttagctcagtctgatcgtttcgaacagacgtattctaatgaaaatgaaaacaatttgatgtttgaaaattttcaatatgtagaacttagaaatattttttcggtagatgctccattagaaaatcatcaagtaagtatacaaaattatcaaggtaatggttttgttattatagaccgaatcgaattcatcccagtaaatgcaacatatgaggcagaacaagatttagattcggcaaagaaagcagtgaataccttgtttacgaatacaaaagatggtttacgaccaggggtaacggattatgaagtgaatcaagcggcaaacttagtggaatgcctatcggatgatttgtatccaaatgaaaaacgcttgttatttgatgcagtgaaagaggcaaaacgactcagcgaggcacgtaacttactacaagatccagatttccaagagataaatggagaaaatggatggaccgcaagtacaggaattgaggttgtagaaggagatgctctatttaaagggcgttatctacgcctaccaggtgcgagagaaatggatacagaaacgtatccaacgtatctgtatcaaaaagtagaggaaggtgtattaaaaccatacacaagatatagattgagagggtttgtcggaagcagtcaaggcttggaaatttccacaattcgtcatcagacgaaccgaattgtaaaaaatgttccagatgatttattaccagatgtacctcctgtaaactctgatggtagaatcaatcgatgcagcgaacaaaagtatgtgaatagccgtttagaaggagaaagaggattaccaaatgggaatcgttctgctgaagcgcatgaattctctctccctattgatataggagagctggattacaatgaaaatgcaggaatatgggttggatttaagattacggacccagagggatatgcaacactcggtaaccttgaattggtagaagagggaccattgtcaggagacgcactagaacgcctgcaaagagaagaacaacagtggaagcttcaaatgacaaaaagacgtgaagagacggatagaaaatatacggcagcaaaacaagcggtagatcgtttatatgcagattaccaagatcaacaattgaatccaaacgtagaaattacggatattactgcggcccaaaacctgatacagtccattccttatgtatataatgaaatgttcccagaaatacaagggatgaactatacgaagtacacagagaaaacaaatcgactccaacaagcgtggggtttgtatgatcaacgaaacgccataccaaatggtgatttccgaaatgaattaagtaattggaatacaacatctggtgtaaatgtacaacaaatcaacaatacgtctgtcttagtcatgccaaactgggatgggcaagtttcgcaacagtttacagttcaaccgaatcaaagatatgtattacgagttactgcaagaaaagaaggggtagggaatgggtatgtgactatccgtgatggtggaaatcaaacagaaacgcttacgtttagtgcaagcgattataacacagatagtgtgtataatacgcaagtgtcgaatacaaatgggttgtacaatgagcaaacaggatataccacaaaaacagtgacattcatcccatatacagatcaagtgtggattgagatgagcgagaccgaaggtatgttctatatagaaagtgtcgaattgattgttgacgtagagtaa

SEQ ID NO: 285 - DNA, 3474 bp, Bacillus thuringiensis
  source 1..3474: mol_type = genomic DNA
atgagtccaaataatcaaaatgagtatgaaattatagatgcgtcatcacctacttctgtatctaataactcagtgaaataccctttagcaagtgatcaaacgaccacattacaaaatatgaactataaagattatctgagaatgtctgagggagagaatcctgaattatttggaaatccagagacgtttattagtgcgcaggatgcggttggaactgggattgatattgtgagtaaactactaggtagtttaggggttccacttgttgggcaagccgcaacggcacttaaatggattataggtaaattgtggccttcttcaggaaacccgtgggatgatttgatgacggcagtagaagaactcataaatcaaaaaatagaagcatatgcaagaagtaaggcacttgctgaattgggtgtttcgggaagagctgtaaaatcctatcaaaccgcacttgaagagtggcaaaaaaacccgaataacgcgcgaagcgcagcacttgtaagggaaagattttcagatgcagaacatacattgcgtactcaaatgagtttatttaccgttcgtggttatgaaattccgcttttagcaacatatgcacaagctgccaatttgcatttgtttgtaatgaaggatattcaaatttacgggagagaatggggatatactcagggagatattaaccttttctatcgagaacaagtagaatttacaggggaatactctgattattgtgttaagtggtacaatgctggcttagataaattaagaggctcgactgctctacaatggattaactataatcgtttccgcagagaaatgacagtgatggcactggatatagttgcattattcccaaattatgacatacgcatgtatccaatgaaaacaaccgcagaattaacgcgaagaatttatacagatccgcttggttatacgggaagtgggtctaacacgccaccatggtataattatggatattctttctcatggatagaaaataatgccatgccagcacctggattgttccagtggttacaaggaattgggatttatactaaatttgctcgtataactccattttatgcgaactattggtcaggacatactgtattttataaatttactaacgattctactgagagacgtgttcagtatggagatacagatactccagaattagatagttcttcctttgaaaatgttgacatttataaggtttcagcatcagttggttcgtacaaaagtaataccgtactattaccaacttttaaagctacttttgagggggtaaatcaaaataatcagttaaagacctttaggtatcaaaaagaatctaatgtcccaagtcaaacgaaaaactcaaccacagagctgcctgttcagttatcaactccgcctacttacggagattctgaacagtacagtcatagactagcctatgtttttgatgccccaatcgattcatatacaggcatatatcgcatgtatggatttgcccctattcttggttggacacatattagtgtaagtcgtgacaataggattgatccagataaaattactcaaattccagctgtaaaggcatatgctgagggtcttgctaattatatcaaagatccggggtttacaggaggagatttattagctttaggtagaaactcaaatacttcattgattgttaatttttcgaagcctcaaacataccgtattcgtattcgttatgctgctagtaaaacttcgtattttcaactacgtgggctgcataatatagctcagtctcagcgtttcgaagcgacgtattctaataaaaatgaaaacgatttgacatttaacgattttaaatatgtagaaattcaaaaaactgtttcaatagacaatccatcagaaagtcgtagtataagtatatacactcaatcagatacagaattacttattatagacaaaatcgaattcatcccagtagatgcaacatttgaagcggaacaagacctagatgtggcaaagaaagcggtgaatggcttgtttacgaatacaaaagatgccttacagacaagtgtaacggattatcaagtcaatcaagcggcaaacttagtagaatgcctatccgatgagttatacccaaatgaaaaacgcatgttatgggatgcagtgaaagaggcgaaacgacttgttcaggcacgtaacttactccaagatacaggctttaatgtaataaatggagaaaacggatggacgggaagtacgggaattgaggttgtggaaggagatgttctgtttaaagatcgttcgcttcgtttgccaagtgcgagagagattgatacagaaacatatccaacgtatctctatcaacaaatagatgaatcgcttttaaaaccatatacaagatatagactaagaggttttataggaagtagtcaagatttagagattaaattaatacgtcatcgggcaaatcaaattgtcaaaaatgtaccggataacctcttgccagatgtacgccctgtcaattcttgtggtggagtcgatcgctgcagtgaacaacagtatgtagacgcgaatttagcactcgaaaacaatggagaaaatagaaatatgtcttctgattcccatgcattttctttccatatggatacaggtgaaatagatttaaatgaaaatacaggtatttgggtcgtatttaaaattccgacaacaaatggatacgcaacattaggaaaccttgaattggtagaagaggggccattatcaggagacgcactagaacgcttgcaaagagaagaacagcagtggaagcttcaaagaaccaaaagacgtgaagagacggatagaaaatatatggcagcaaaacaagccattgatcgtttattcgcagattatcaagaccaacaactcaattctggtgtagaaatgtcagatttgcttgcagctcaaaaccttgtacagtccattccttatgtgtataacgaaatgttcccagaaatccctggaatgaactatacaaatttcacagagttaacaaacagactccaacaagcatggaatttgtatgatcttcgaaatgctataccaaatggagattttcgaaatggattaagtgattggaatgcaacatcagatataaatgtgcaacaactaaacgatacatctgtccttgtcattccaaactggaattctcaagtgtcacaacaatttacagttcaaccgaattatagatatgtattacgtgtcacagcgagaaaagagggagcaggagacggatatgtgatcatccgtgatggtacaaatcagacagaaacactcgcatttaatacatgtgataatgatgcaggtgttttatctactaatcaagctagctatatcacaaaaacagtggaattcacaccatctacagagcaagtttggattgacatgagtgagaccgaaggtgtattcaacatagaaagtgtagaactcgtgttagaagaagagtaa

SEQ ID NO: 286 - DNA, 2094 bp, Bacillus thuringiensis
  source 1..2094: mol_type = genomic DNA
atgaatccatatcagaataagaatgaatatgaaatattggatagttcacaaaataactttaatatgtctattaatcatttacaatatccattaaaaaatagtccatatcctcaattttctatagacaattgtaggcgtagtaatactgctacttgggttaataatattggggatgcagttagtgaatcaatatctttggtgtcaacaatattggggatttttacagaacctaatttgtggggagtattttctgcattaattggtcttctagataggatgagaggtgctctgggaacaccttctatagctgcattatctatatgtgatttgctagaaattattgatgaacgagtaaatcggagtgttttgaatgacggaatcgctgattttaatggttcattagctctatttggaaatttcttgtccgcattaaattcctggagaaataatccaaacaatagtactgctgatgagcttcgttttcgttttagagcatctgattcagaatttgataggagtttaacaaatggatctttaacacatggtggttcattagctagacaggatgcacaaatattattattaccttcttttgcaaaagctgcatattttcacttatttttattaaatgaggctattacaagtggatctaattggggtctggagattaggcctactataaattatcaagaaaaattagaaaatagtattagaaattacaccaattattgtgtacattggtacaatcagggtttagaggaaatacgccgccggaataatagtggtgaaaattggttagtatttcacagattccgtagagatatgacattgcaagtattagatctagtagcaacatttccgaattttgatactaatcgatattctacttcaatgccaataactactcaattaagtagggtgatttatacagatccaatcggttgtgtaagtcaatcccatctaaatagtaattggtttggcccagtaaatggtactaattttacaagtttagaaaatgaaattcctagtcctaccctttctcaatttttaaattctatagatttagttgatcagccgcttagatggggtgttggaactaatggaggaaatacatggcaaggaaatacaaatagttttaatttttcctcttcatctactgttttccatgaaagttatggaagacgaactggtcagaatattatccgtgggctgaatggtagggatgtttttagaatagattcgagacctatttctctagatggtcatacattcggagttaatagagtagaatttcatcatactactagttctcaaaactctatatatacaggatatttgagaacatccggacttaatagaccagtggttcagaatgtccggacgtttttaccaggagaaaattctgatataccaaatcgagaagattatactcatagattaagtagggtagcaaatataacaggtgggcttcgacatgtagcagttcgtgaggatcaaagttcttctttattgttatatggctggacacataaaagcttaactcgtgaaaatatgtataatcttaatgaaatttttcaaatacctgctgtaaaaacaatgaacacacctggtattcaagtaattgcaggacctggatctacaggtggggatttattaagactaaatcttggtgctagagtaacttataattgtagacctgctcgtccattagaaacaccaatggtagtacatgtacgtgttcgttatgctagtgtaggaagttctacaataagaatagagtttactgatccatctggttcatttaatccacaaacacttgctttacctgatacaaattcatcattaaataatcttcaatatcaaaatttcaacatggttaccactaatttcgcacgtggtacgagtataatgcaaggtaatttttcaataagtattataaatatgaatggagctaatttagctttagataaaattgaaattataccggttcgtattggtcgaaacacctcagaacaagtaaaagaatttattgataaactgggttgtgttgcaaagtttgaaaaatatagttatagtttaagcggttctgaataa

SEQ ID NO: 287 - DNA, 2028 bp, Bacillus thuringiensis
  source 1..2028: mol_type = genomic DNA
atgaatccatatcaaaataagaatgaatatgaaatattcaatgctccatccaatggttttagcaagtctaataactattctagatatccattagcaaataagccaaatcaaccactgaaaaacacgaattacaaagattggctcaatgtgtgtcaagataatcaacaatatggcaataatgcggggaattttgctagttctgaaactattgttggagttagtgcaggtattattgtagtaggaactatgttaggagcttttgctgcccctgtcttagctgcaggtataatatcttttgggactttgttgccgatcttttggcaaggatctgaccctgcaaatgtttggcaggatttgttaaacatcggaggaaggcctatacaagaaatagataaaaacataattaatgtactaacttctatcgtaacacctataaaaaatcaacttgataaatatcaagaatttttcgataaatgggagccagcacgtacacacgctaatgctaaagcagtacatgatctctttactaccttagaacctataatagataaagatttagatatgttaaaaaataatgctagctatcgaataccaacactccctgcatatgcacaaatagctacttggcacttgaatttattaaaacatgctgctacctattacaatatatggctgcaaaatcaaggtataaatccaagtactttcaattcatctaattactatcagggctatttaaaacgtaaaatacaagaatatactgactattgtatacaaacgtacaatgcaggactaactatgattagaactaatactaacgcaacatggaatatgtataatacttaccgtttagaaatgactctaactgtgttagatcttattgctatttttccaaattatgacccagaaaaatatccaataggagttaaatctgaacttatcagagaagtttatacgaatgttaattcagatacatttagaaccataacagaactagaaaatggattaactagaaatcctacattatttacttggataaaccaagggcgtttttacacaagaaattctcgagacattcttgatccttatgatattttttcttttacaggtaaccagatggcctttacacatactaatgatgatcgcaacataatctggggagcggttcatggaaatattatttctcaagacacatccaaagtatttcctttttatagaaacaaacctattgataaggtcgaaattgtcagacatagagagtactcagatataatatatgaaatgatatttttttcgaatagcagtgaagtatttcgatattcatccaattcaacaatagaaaataattataaaagaactgattcttatatgattccaaaacaaacatggaaaaataaagaatatggtcatactctatcgtatataaaaactgataattatatattttcagtagttagagaaagaagaagagttgcatttagttggacacatactagtgttgatttccaaaatacaatagatttagataacatcacccaaatccacgctctaaaagctttgaaggtaagttctgattcgaaaattgtgaaaggtcctggtcacacaggtggagacttggtaattcttaaagatagtatggattttagagttagatttttaaaaaatgtttctcgacaatatcaagtacgtattcgttatgctactaatgctccaaagacaacagtattcttaaccggaatagatactataagtgtggagctccctagtaccacttcccgccaaaacccaaatgctacagatttaacatatgcagattttggatatgtaacatttccaagaacagttccaaataaaacatttgaaggagaagacactttattaatgaccttatatggtacaccaaatcattcatataatatatatattgacaaaatcgaatttattccaatcactcaatctgtattagattatacagagaagcaaaatatagaaaaaacacagaaaatagtgaatgatttatttgttaattaa

SEQ ID NO: 288 - DNA, 1941 bp, Bacillus thuringiensis
  source 1..1941: mol_type = genomic DNA
atgaattatatggaagatagttctttagatactttaagtatagttaatgaaacagactttccattatataataattataccgaacctactattgcgccagcattaatagcagtagctcccatcgcacaatatcttgcaacagctatagggaaatgggcggcaaaggcagcattttcaaaagtactatcacttatattcccaggttctcaacctgctactatggaaaaagttcgtacagaagtggaaacacttataaatcaaaaattaagccaagatcgagtcaatatattaaacgcagaatatagggggattattgaggttagtgatgtatttgatgcgtatattaaacaaccaggttttacccctgcaacagccaagggttattttctaaatctaagtggtgctataatacaacgattacctcaatttgaggttcaaacatatgaaggagtatctatagcactttttactcaaatgtgtacacttcatttaactttattaaaagacggaatcctagcagggagtgcatggggatttactcaagctgatgtagattcatttataaaattatttaatcaaaaagtattagattacaggaccagattaatgagaatgtacacagaagagttcggaagattgtgtaaagtcagtcttaaagatggattgacgttccggaatatgtgtaatttatatgtgtttccatttgctgaagcctggtctttaatgagatatgaaggattaaaattacaaagctctctatcattatgggattatgttggtgtctcaattcctgtaaattataatgaatggggaggactagtttataagttattaatgggggaagttaatcaaagattaacaactgttaaatttaattattctttcactaatgaaccagctgatataccagcaagagaaaatattcgtggcgtccatcctatatacgatcctagttctgggcttacaggatggataggaaacggaagaacaaacaattttaattttgctgataacaatggcaatgaaattatggaagttagaacacaaactttttatcaaaatccaaataatgagcctatagcgcctagagatattataaatcaaattttaactgcgccagcaccagcagacctattttttaaaaatgcagatataaatgtaaagttcacacagtggtttcagtctactctatatgggtggaacattaaactcggtacacaaacggttttaagtagtagaaccggaacaataccaccaaattatttagcatatgatggatattatattcgtgctatttcagcttgcccaagaggagtctcacttgcatataatcacgatcttacaacactaacatataatagaatagagtatgattcacctactacagaaaatattattgtagggtttgcaccagataatactaaggacttttattctaaaaaatctcactatttaagtgaaacgaatgatagttatgtaattcctgctctgcaatttgctgaagtttcagatagatcatttttagaagatacgccagatcaagcaacagacggcagtattaaatttgcacgtactttcattagtaatgaagctaagtactctattagactaaacaccgggtttaatacggcaactagatataaattaattatcagggtaagagtaccttatcgcttacctgctggaatacgggtacaatctcagaattcgggaaataatagaatgctaggcagttttactgcaaatgctaatccagaatgggtggattttgtcacagatgcatttacatttaacgatttagggattacaacttcaagtacaaatgctttatttagtatttcttcagatagtttaaattctggagaagagtggtatttatcgcagttgtttttagtaaaagaatcggcctttacgacgcaaattaatccgttactaaagtag

SEQ ID NO: 289 - DNA, 1941 bp, Bacillus thuringiensis
  source 1..1941: mol_type = genomic DNA
atgcaaaataacaactttaataccacagaaattaataatatgattaatttccctatgtataatggtagattagaaccttctctagctccagcattaatagcagtagctccaattgctaaatatttagcaacagctcttgctaaatgggctgtaaaacaagggtttgcaaaattaaaatccgagatattccccggtaatacgcctgctactatggataaggttcgtattggggtacaaacacttttagaccaaagattacaagatgacagagttaagattttagaaggtgaatacaaaggaattattgaggtgagtaaagtttttactgattatgttaatcaatctaaatttgagactggaacagctaataggcttttttttgatacaagtaaccaattaataagcagattgcctcaatttgagattgcaggatatgaaggagtatccttttcactttttactcagatgtgtacatttcatttgggtttattaaaagatggaattttagcaggaagcgattggggatttgctcctgcagataaagacgctcttatttgccaattcaatagatttgtcaatgaatataatactcgactgatggtattgtactcaaaagaatttggacggttattagcaaaaaatcttaatgaagccttgaactttagaaatatgtgtagtttatatgtctttcctttttctgaagcatggtctttattaaggtatgaaggaacaaaattagaaaacacgctttcattatggaattttgtgggtgaaagtatcaataatatatctcctaatgattggaaaggtgcgctttataaattgttaatgggagcacctaatcaaagattaaacaatgttaagtttaattatagttatttttctgatactcaagcgacaatacatcgtgaaaacattcatggtggcctgccaacatataatggaggaccaacaattacaggatggatagggaatgggcgtttcagcggacttagttttccttgtagttatgaattagaaattacaaaaataaaacaggaaataacttacaatgataaagggggaaatttcaattcaatagttcctgctgctacgcgcaatgaaattctaactgctaccgttccaacatcagctgatccattttttaaaaccgctgatattaactggaaatatttctctccgggtcttttctctggatggaatattaaatttgatgatacagtcactttaaaaagtagagtaccaagtattataccttcaaatatattaaagtatgatgattattattttcgtgccgtttcagcctgtccaaaaggcgtatcacttgcatataaccatgattttttaacgttaacatataataaattagaatatgatgcacctactacacaaaatatcattgtaggattttcaccagataatactaagagtttttataggagcaactctcattatctaagtacaacagatgatgcctatgtaattcctgctttacaattttctacagtctcagatagatcattcttagaagatacaccagatcaagcaacagatggcagtattaaatttacggatactgttcttgggaatgaggcaaaatattctattagactaaatactggatttaatacagctactaggtatagattaattatacgttttaaagcgcgtgctcgtttggctgctggtatacgtgtacgttctcaaaattcagggaataataagttattaggtggtattcctgtagagggtaattctggatgggtagattatattacagattcatttacttttgatgaccttgggattacaacttcaagtacaaatgctttctttagtattgattcagatggtgtaaatgcttctcaacaatggtatttgtctaaattaattttagtaaaagaatccagttttacgactcagattccattaaaaccatag

SEQ ID NO: 290 - DNA, 4391 bp, Bacillus thuringiensis
  source 1..4391: mol_type = genomic DNA
gaaaattcgagaattaatcagacatgcaggcgccaaaaacgtagtattggatggcagagatggagtaatgaatatctctatggtgtactagggctctattgggactggaaagttcgtccccttgaaagctcaggaagatattgataaaagtgtctgccatttgataggtctcataacccttttgatgaagtttatggggtgagctgcttgagggaaaacctcacgagcagttcttatggggaggggctggaaacgggttataactgataccgcgccagtcctttacccgacaacgaacttttgcttggttagaaaattaccgcaggctttggaaaaactgtgaacgaacacttgaaaatagcagacaaagttgcttattggcagctgtggctattttattaaaaagattccaaacaggttctcagaaaatagttgtaattcatcttgaatcgaaagattcataaaaaacgtcatcctttctagctttttagaaagaataacgttttttgacacttgggggtagtcttatttcttaagttgatgggcatgcaacagaaccctaaaaaatcaataattcaacaaaaataatggggatatttgttgaattattgcaacaggaatacatacgtagattgcgaatatttagaagtacaccctacatattattggttaggtggaatgaattataaaaaatgatgggaataagggaggaacgaagatgcattattatgggaataggaatgaatatgacatattaaatgcttcatcaaacgattcaaacatgtctaatacttatccgaggtatccgttagcaaatccacaacaagatttaatgcaaaatacaaattataaagattggcttaatgtatgtgaagggtatcatatagaaaatcctagagaagcaagcgttagagctggacttggtaagggattaggtatagttagtacaatcgtagggttctttggtggttctattatcttagatacaattggattgttttaccaaatttcagagctactttggccagaggatgatacccagcaatacacttggcaagatattatgaatcatgtagaagatcttatagacaaacgaataactgaggttatacgaggaaatgcaattagaacattagcagatttacagggtaaagttgatgattataacaattggttgaagaaatggaaagacgatccaaaatctacaggtaatttaagcaccttagtaaccaagtttacggctcttgattcagattttaatggtgctataaggacagttaataatcaggggagtccaggttatgagttacttttattgcctgtctatgcacaaattgcgaatctgcatttacttttattacgggatgctcagatttatggagataaatggtggagcgcacgagctaatgctcgtgataattattaccaaatacaattagagaaaacaaaggaatatacagaatattgtataaattggtataataagggtttaaatgattttagaacagcaggtcaatgggtaaactttaatcgttatcgtagagaaatgactcttactgtattagatattatttcaatgttccctatttatgacgcgagattatatcctacagaagtaaaaaccgaactaactagggaaatttattcagatgttattaatggggagatatatggacttatgactccttatttttcttttgagaaagctgaatcactttatacaagggcaccccatctcttcacttggctaaaaggatttcgatttgtaaccaattctatttcttattggacatttttatcaggtggtcaaaataagtattcttatactaataattctagtattaacgagggctcttttaggggacaggacacagattatggtgggacttcttctaccattaatattccatcaaattcgtatgtatataatttatggacggaaaattatgaatatatttatccttggggtgatcctgtaaatattacaaaaatgaatttttctgtaacagataataattcttcaaaagaattaatttatggtgcacacagaacgaataaacctgttgttcggacagattttgattttctcactaataaagagggaactgagttagcaaaatataatgattataatcatattttatcctatatgttaattaatggggaaacgtttggtcagaaacgtcatggttattcgtttgcttttacacatagtagtgttgatcctaataataccattgcagcgaataaaattacgcaaattcctgtagtgaaagcttcgagtataaatggatcgatttcaattgaaaaaggtcccggatttacgggaggagatttggtaaagatgagagcagattcaggtttaactatgcgttttaaagctgaattattagataaaaaatatcgtgttcgaatacgttataaatgtaactacagttctaaattaatactacgaaaatggaaaggggaaggttatatacaacaacaaattcacaatatttctcccacatatggagccttttcttatttagagtcttttactataactacgacagaaaatatatttgatttgacaatggaggtaacatatccgtatggtagacagtttgttgaagatataccatctcttatattagataaaatcgaattcctcccaactaactgataccattcacaggaaatatgaggaaaaatatgaattagaaagatcacaggaaacatttaatagtatatttgttgattaaaacaaagtactaacgtagatggtatagctgtttgaaaaaataagaaaaaaggttgtgaattttatgcttacaagtggtgcgaaaaatatgttaaaactcgaaacgacagattatgaaatagatcaaatggcgaatgctatagaaaatatgtcaggtgaacaatattcacaggaaaaaatgatgcaatggcatgacataaaatatgccaaacaattgagtcaagcacgtaatttacttcaaaatggtgattttgaggatttatttagtggatggactacaagtaatcagatgtccattcaggcagataatgcaacttttaaagggaactatctgcatatgtctggggcgagagacatatatggaacgatattcccaacgtatatataccaaaaaattgatgaatccaaattaaaaccgtatacgcgttatctagtcaggggatttgtgggaagtagtaaagatctagaattaatggtaatgcgttatggaaaagaaattgatacagtaatgaatgtaccaaatgacataccgtacgtaccttctatgccggtctgtaacgaattatatgatggtcaacaaccgtatccaaataggcatgtaggatattataatccaatgccagtttctcagccttcttacacatccgatacttgtcagtgtacgcccggcaaaaaacatgtggtatgtcatgattctcatcaattcaagtttcatattgatacgggggaagtagattacaatacaaatctaggaatttgggtgttgtttaaaatctcttcacccgatggctacgcgacattagataatttagaagtaattgaagagggaccagtaagaggcgaagcagtgacacatgtaaaacaaaaggaaaagaaatggaatcagcaaatggagaaaaagcgcatggaaacaaagcgagtctatgaccgagcaaaacaggcggtagatgcattatttacaggagaagagttaaactatgatgttacattgtcacacattaagaacgccgatgatttggtacagtcgattccatatgtacacaatgagtggttaccggattttccaggcatgaactatgatatataccaagagttaaacgcgcgtatcatgcaagcacgctatttatacgatgcacgaaatgtcataacaaatggggattttgcacaaggattacaagggtggcatgcggaaggaaaagtagaagtacagcaaatgaacggaacgtctgtattagtcttatccaattggagctctggagtatctcaaaaccttcatgtccaacatccacatggatatctgttacgtgtgagtgcgaaaaaagaagggtctgggaaaggctatgtaacgaggatgagttgtaatggtaagcaggaaacacttacgtttacgtcctgtgacggaggatatatgacaaaaacggtagaggtattcccagaaagtgatcgtgtacgaattgaaattggggagaccgaaggttcgttttatattgaaagcatcgaattgatttgtatgaacggatatactagcaataataaccagaatatgagtaatatgtatgatcaaagttatagtgggaattatagtcagaatactagcgatatgtatgatcaaggaggttctgttgcaaagtttgaaaaagaatagaat

SEQ ID NO: 291 - DNA, 3668 bp, Bacillus thuringiensis
  source 1..3668: mol_type = genomic DNA
gactttttttgactatatgcatggcctctattccaacaatcatttttgtagctgtgcgccatgatttgaatccaagcatattccagattcattttttgataaatctatggtcttgttcaattatgttgtttacatatttttttacccgtagcggcatatcatttggtatatttttttcattttttaattctcgtatcgcaacaggataggctttatcaccatcaattgtgattacacgaggttttgtgacatgacaagaagccaatgctttctttagaaaacgcttggtagccttcgcatctcgtttcttacccaaataaaaatcaagggtgtttccttcggaatcgacagcaccatataggtacattttttcgcctttgatttttaggtatgtttcatcctgatcacgcacctttttttagtagtagtaccagtatggccaagttagaaaaatcattttcaagtttttttatgcttttgtaccagaaccgaatatttacctagatctataaatacgtataagattgataaatgttatacattctttcaattacttagtagtgacttccttaagcctacacataatatggattatagaaatattagtatagtgggaggaatcaaaatgaattcttatcagaataagaatgaatatgaaatcttagatgctaagcgaaatacttgtcacatgtctaattgttatcccaagtacccattagcaaatgatcctcaaatgtatttgcgcaacacccattataaggattggataaatatgtgcgaggaagcttcttatgcatcttcaggtccttcacaattatttaaagttggaggttctatagttgctaaaattcttggaatgattcctgaagttggtcctcttttaagttggatggtatctttattttggccaactattgaagaaaaaaatactgtttgggaagatatgataaagtatgtagcaaatctgctaaaacaagaattaacaaatgatacacttaaccgtgccactagtaatttatctgggttaaatgaatctttgaatatatataaccgagctctcgctgcgtggaaacaaaataaaaataatttcgcaagtggtgaacttataaggtcatatataaatgatcttcatatactctttacaagagatattcaatcagatttctcattaggaggttatgaaacagtattattaccttcatatgcaagtgctgccaatcttcatttacttttgttacgtgatgttgcaatttacggaaaagaattaggatatccatcaactgacgtagagttttattataatgagcaaaagtactatacagaaaaatatagtaattattgtgtaaatacgtacaaatcgggtttagaatcaaaaaaacaaataggatggtcagattttaatcgatatcgtagagaaatgactttatccgtattagatatagtcgcattattcccactgtatgatacaggactgtatccgagtaaagatggcaagatacatgttaaagctgaactaacaagagaaatctactctgatgttattaatgatcatgtatacggactcatggttccctatatatcttttgaacatgctgaatctctgtacactcgcaggccgcacgcatttacttggttaaaaggatttagatttgtaacgaattctattaatagttggacctttttatcaggtggtgaaaatagatatttccttactcatggagagggtactatttataatggaccttttttggggcaggatactgaatatggaggaactagttcttatatagatatctctaataattcctctatttataatttatggaccaaaaattatgaatggatttatccatggactgatccagttaatattacaaaaataaatttttctataacagataatagtaattctagtgagtctatttatggtgcggaaagaatgaataagcctactgttcgaacggattttaattttcttcttaacagagcaggaaatggtcctacgacatataatgattataatcacattttatcttatatgttaattaatggagaaacgttcggacaaaaaagacatggttattcatttgcatttactcatagtagtgtagataggtataataccattgtcccagataaaattgtgcaaatacctgctgtgaaaactaatttggtcggtgcgaatataataaagggtcctggtcatacaggtggcgatttacttaaactagaatatgagcgttttcttagtttacgtattaagcttatagcatcaatgacttttcggattagaattagatatgcttctaatatttctggacaaatgatgattaatataggttaccagaatcctacttattttaatattatccctacgacaagtagggactatactgagttaaaatttgaagatttccaattagtggacacatcctatatttactcaggtggcccatcgattagttcaaatacattatggctggataatttttctaatggacctgttattatagataaaattgaatttataccgttgggaattacactaaatcaagcacaaggttatgatacatacgaccagaatgctaatggtatgtatcatcaaaactacagcaattctggctataattataatcaagaatacaatacttattaccaatcgtataacaattaggttgtgttgcaaagtttgaaaaaacacaaccttgtgtgcaaaatatagttatagtttaagcggttctgaataactcctgtaattccttgtacgtcgaaaaagagaagtctggaatgtgacttctcttttgtttgtatatcgcatgaatcgtttcgattcctttcaatgtacgtgaagcatggcggagattttgaaatcctgcggatttaacaaaacggcgcttgatatgtctatgatcttgttcaatgagattatttagatgcttaacggtacaatgtttcgtatgtacatacaaaccgttatgtttcagttttttgagcgcacaaagtaaagcaggagccttgtctgtagtaagaaccgttggttctccaaaatctttaaccagtcgcttcataaacatataagcggcttgatgattgcgtgttttacgaagttgaatatccaaagtatgcccatctccaccaatagcacgataaagatagcgccattcgcctttcactttgatgtaagtctcatctaaatgccatatgaaatgtgcggatttgtttttctttttccaaatttgataaatcagattgccgtattcgtgaacccaacgcatgatggttgttggatgaactgatattccacgttctttcaagatttcagatacatcacgatagcttaaagaaaaacgacaatagtagccaacggctaccaaaataatatcttttttgaattgttttcccttaaaatatcccatgtgatatgctcctcatcccattttctctatataagttccgtttaatattttaacaattgttcagtccctaacctttgaagtaccttttcaggaaattgagaaagatgttctagaaaagaaagaacggatgtttttatttctttctgggatgcatgaaaacgattagagataacactttcttttaatgctttccaaatacgttccaataaattcaaattgggagaatacggcggtaaaaagacgagtgttgac

SEQ ID NO: 292 - DNA, 4807 bp, Bacillus thuringiensis
  source 1..4807: mol_type = genomic DNA
gcttcatttaaaaaactttgcaacagaacctcagtacatttgtttctttttatacgcacatatacatgcctgttttgcatataatattttggtgatattcttcataaaaaaggagtgattttattggtacagttatctgatttattacctagttattataatgtattagcttctccccctacaattttagatgctaaccaagactggttccccacaggtaatgatttcaaaagtgtaataaatgagctgaaagatgcttttactaaatttcaaaaagattttcatactagcgaccttattaacactatacaatccatttataactcttatggctctcaaggaatggattgggtcaatgtggctcaagctgtaataacttttgcttttggttttgtacccggtggatcattagtctctgcaggacttaataaaataataggtatatttttccccaaagaccctaatcctactgtatttgatcaaataaaagccgcagtagaacaattaatactcaattcatttatcacatatgatatacagggcgatataactgaattgaataaactgaaagattattctggaatattagcaaattctatacaagtagcgcttggtcaatcccaatttcaagaattccaacaagtaaatcctactgggccaccgacaaattgtactcataccccctcttgtactttagatccaactaaccctattccaccaaattgtagctgtttattgaattttgtatatcaaaattataataatcacacttccgatataaacacggtattacttcaaatagaaggttctattccaaagatttttgctcttattaatcaatccacaacagcaactactgctcaaaaaaaccaactaaaatctgattatttacaagcatatcttcctttatatgtaatgggcgcaactttagaaatgatatactatagaacatatattcaatttgctgaaacatttcagtatggtttaagtgaacaaaatagtactacactaacggctatgcacaacttacgtcttacaatttctagacgaactacatttctattcaataattttctcccatttttaccaagtataacttcaaatacaaaaggagatttaaattcatatattcaatatacaagacgtataacaataaatgctctggatactgctgtattttggactttactagatccatttgattatcctgtgtccgcaaatcaaacattatcccgtattatttttaatgatattgtaggaccagtagaatgtaaagctggtaaccaaaatagcaataacttactattcaatttttataacgtagatgggcaaccacttccaaataactctattactaattatttttataataatatgcaattaagaggtttgcaattccaaatatataaatatagttcaacctctacttatttctcgacaacatctgatattccaattggatttaaagcttcttatcgtacaaatggtagcgataaaaatattgatcatacacgttctctaccatacggactaaaaggatctacaacaacattaactgatgatatatatatcacgaatcctagttttaatattataaatatgaactcctctcaaacatcaggtcaaattgctacagatgtctcacaaattctatatacacctatttcagatataaaacaaaattgtttttctcaaaacagtccttatttagggaataatagaattcaagctatttatcctctacaacccactaatccaaacacttataatgcttatggtagtacagataaactcggatttttaactacactcatttcaaatgacaccactacaaaccttgtatttacttctgatcctatttatacatttcctgccgaacaagctactgtattatctggaacaaaacttgttgaatatgtgaatggtacagcttctgttcaattacaaaatgggcaaaatgctcaatacacgatagataatacaacaagaattgcaggtcctacacaatttcaattacgagtacatgtagcgacagatccagcagttacagatccaaatgttttaggacaactcgctattacaattgataatcaacgaacacaatatttaactatacccaatacaaatgttgattatagtaatccaataactcttttaaacggtcaacaacttaaccaattacgggtaaaaggaacacaaggtgcttatatgttagtacccgctagtaatctaaataatatcaatgatcgtaataccaatgtttttacattaaatccaaatgcatctatgaatgtaaatattcaaaatacaggaaatctaacagttatattagatcgtattgaattcgttcctatcgattcaacagtaataatcccagcacaaacactatattcaaatcaagcttatactctttgggaatcaacaaatggattaattggaaaacaggctttattagtagtagatgattatttacattttactgttcaatattattaccaatctcaattagtccattctaatgaacaaaatatatatgatgttaattatattggtctatttgataaaattacggctagtactatcgctgatactttagtaaaccttacaaatggaattgtttatttaactactaatacaacaccaacaccaacaccagctgtaccaagcccaattcctcctatatccaatcaaaatataggagctggatttgaatatactgtttgggatggtaataacaaaactggaaataccgtaaattttcaaggattcgctgcaccaaatagtggttccgaaggtttattatttcaatataaatataatgatcaagtaattgacacagatcaagtatcaaaccaattttctatccaacgtaaattagcaggtacaattaataaaattacagcaacaggtggaacaccaaatggagtgtatttaacgataaataatggtggttccgtgagtacaacataaaaaggaggaaaataaaatgaatccatgttctccattccaaaatatacctcaaaggaatttaaatcttcctgtttttattacaaaacaagaattagaacaaattactaaaatggtatctaacttatttttaacaacaaatcctgctttattacattgtttaccacctgatattacgttattagctcctcatgttagtgattattggattgatcaattactaatgaaagttgataaactgtcaactgaattatatggtgtcgaaaaacaagaattacgaaaattattaaatatagccaaacaaatgagtgttgcacgaaataaattaataggtggaaactttgaaacagtagaggcttggacattcggtacacaagcaactgttctttccaattcacctttatttgtagggaattttctatctttagaacctacaaatggtatatggacttcctacgcatttcaaaaaattaatgaatctcaattaaaaccatttacacgttatagtatttctggttttatcgctaatagtcaagggttagaacttacaatttcacgatacggaacagaattacaaactgttataaacattccaattgaaacagcacttcctatttatccaaatccaattccaaattgttgccagccaagtccatgtggatgcgattcttgtcaatatagagattcacatctttttaactattcaattaatgtaggtactttatttccagaattaaatcctggtattgaaattagtttacgcataatcgaaccaaacggaagagccagaattagtaatttagaagtaatagaagagcgtcctcttacagaagaagaaagaagacaaattcaacgaacagaacaattatggctaacaagagtagaaagagaactaaaaatcatttgtgatttatttgaaccaattattaaacaaattaactcctactttccagaaggggattggaacaatcacattttttctcatgtcacatatcaagatttatatagtattgtcataccggcactcccgatcattgaaaattggtctatgacgcatttgacaggtatgtataatcatctagtacgaccgattaaagaagtgatccaacaaattgaacaacaattagaagctcgaaatttacttcataatggaaatttttcaaatggactgacagattggactgtttgtggtgaagcaaccataatacctttaacaaatcaaaatcaagctttattcctttcttattgggattctatggtttcacaaactgttacagttgtaaattttaatccagataaattgtatttattacgtatctatgcaaaaggaaatggaactgttcttgttcaacataatggacacacagaacgtgttaacttcacacaagatttcttccaatcaaaagaacatactttttatctagatatggcaacctttaccgtagatattcaatccaattcaaatgattttacagtagattatgtagaaattatagaaatataaaataaacaaaactacatgtttttacttcatgtagttttttctctctttcttactctattcaagaaacgaggtgattgtatgcaaaaaaaaacaattttaataaattcttcttccacttctagcccctctccttccacctcttctttttcttcttctcaattactacaacaaggatataccaaaaaacaaggttgtaattgtaataaatagacaaacaaaaatagtgtatttaaaaaagttgcaaagtttgagaaatcataagtctgtttacaaaatactcttgtcatttaagcggttctgaataatggctataattctttctacgtcgcaaaagag

SEQ ID NO: 293 - DNA, 2169 bp, Bacillus thuringiensis
  source 1..2169: mol_type = genomic DNA
atgaaagaacaaaatctaaataaatatgatgaaataactgtacaagcagcaagcgattatatcgacattcgtccgatttttcaaacaaatggatctgctacatttaattctaataccaatattacaactttaacacaagctataaatagtcaagcaggagcaattgcaggaaagactgctctagatatgagacatgactttacttttagagcagatatttttcttggaactaaaagtaacggagcagacggtattgcaatcgcatttcatagaggatcaattgggtttgttggaacaaaaggcggaggacttggaatattaggtgcacctaaagggatagggtttgaattagacacatatgcgaatgcacctgaggacgaagtaggcgattcgtttgggcatggggcaatgaaaggatcattccctagtttcccaaatggatatccccatgctggctttgtaagtactgataaaaatagtagatggttatcagccctagctcagatgcagcgaatcgctgctccaaacgggcgttggagacgtctggagattcgttgggatgctcgtaataaagagttaactgcaaatcttcaggatttaacttttaatgacataactgttggagagaagccacgtactccaagaactgcaacttggaggttagtaaatcctgcatttgaacttgatcagaagtatacttttgttattggttcggcgacgggtgcatctaataacctacatcagattgggattatagaatttgatgcatactttactaaaccgacaatagaagcgaataatgtaaatgtcccagtgggagcaacatttaatccaaaaacatatccaggaataaatttaagagcaacagatgagatagatggggatttgacatcgaagattattgtgaaagcaaacaatgttaatacgtcgaaaacgggtgtgtattatgtgacgtattatgtagagaatagttatggggaaagtgatgaaaaaacaatcgaagtaactgtgttttcaaaccctacaattattgcaagtgatgttgaaattgaaaaaggggaatcttttaacccactaactgattcaagagtaggtctttctgcacaggattcattaggcaatgatattacccaaaatgtaaaggtaaaatcgagtaatgtggatacttcaaagccaggggaatatgaagttgtatttgaagtgacagatagctttggtggaaaagcagaaaaagatatcaaggttacagttttaggacagccaagtatagaagcgaataatgttgaattagaaatagatgatttatttgatccattaacagatgcaaaagtaggtctccgtgcaaaggattcattaggtaatgatattacgaaagacgtaaaagtaaagttcaataacgtagatacttcaaattcaggaaagtatgaagttatatttgaagtgacggaccgttttggaaaaaaagcagaaaaaagtattgaagtccttgttctaggagaaccaagcattgaagcaaatgatgttgaggttaataaaggtgaaacgtttgaaccattaacagattcaagagttggcctccgtgcaaaagactcattaggtaatgatattacgaaagatgtgaaaataaaatcaagtaatgtggatacttcaaaaccaggtgaatatgaagttgtatttgaagtgacagatcgttttggtaaatatgcagaaaaaacaattggagttatagtgccagtaattgatgatgaatgggaagatggaaatgtgaatggttggaaattctatgctgggcaagatattaaactgttgaaggatcctgataaagcctataaaggcgattatgtattctatgattctagacacgttgctatttctaaaacaattccactaacggatttgcaaataaatacaaactatgaaattacagtgtatgctaaagcagaaagcggcgatcatcacttaaaagtgacgtataagaaagacccggcaggtccagaagagccgccagttttcaatagactgattagcacaggcacattggtagaaaaagattatagagaattaaaagggacgttccgcgtaacagaattaaacaaagcaccattgataatcgtagagaattttggagctggatatataggtggaattagaattgtgaaaatatcgtaa

SEQ ID NO: 294 - DNA, 3711 bp, Bacillus thuringiensis
  source 1..3711: mol_type = genomic DNA
atggacccaaatgatcataatgaatatgaagtcatggatactggcagcatgggctatcagccaaggtatccccttgcgaatgcacctggtgctgaattgcaacagatgcattacaaagattggatggatatgtgtacgtatggggaatcagtagcattatccgaggggcttagggctgcgctatttgttgctaatagtattatagggataatgctttcaaagattccaattgtgggtcctatagtatcaacaccctttcaaataatgggcgcagtacttccattcttgtggccgccaaacgcacccgaggcccaattttcatgggaaagcctgatgacagctgcggaagagattgctgataaaaagatcgacgcacaggtacgagctaatgcgaatgcagaattagaaggagttcataacgctatacgactctatcaagatgccgtttgcgattggaaacaagatcctaccaatgcccaactgaaggaacaactccgaatacaatatattgctacgaataccgttatctttagtagaatgccgtcttttcgagtacgaggatttgaagtcccattactcagcacttatgtgcaagcggctaatttacatttaatccatttaaaagatggagttcaatttggagaagaatggggaatggactcagcaacagttgatcgattttatagctacctaaaatcagatatagaaatctatacgaattattgtatagattggtataataaagggttatcggatagtatagaatctgaacccacttggaatggttggaatacgttcaataatttccgcagggatatgactcttatggtccttgatttagtttcgatatggccaacatatgacccgagacgctatccccttcctaccaaatcacaattgacacgagaattatatacacaagctatagggagttataaaagtgttgagcctcttctgccccctccatctccatttagatggttacgtgaaatagagttttttttaagagacagtcaggatgaggtggaacagtttgctggttttcaacaggggtatcaatacacgcttgacaccaccatctatcgtccaccagtagttggtacacggacttccctagttgatagtattgctatgggactgggttctgatgatgtagtgtatagaataaagaatatttcctacaatggatggtttccaaaaaaacttgatttttattatactccttccgaacgcgttgaaagtgtaggagagattcgtactgatgctaataatatgattgattatatcggacttggttgtagggcgaaggtgactgaaccttgtgatccttgtacgactaattgtacgattgatactgtgaatacaaccgcatcttgtgacaatcctaatctttatagccatcgattgtcatcgataaacccaagtgctccatacccgggtcaaaattggatgtttagcttttgctacggctggactcatttcagtgtagatgacaacaatttgatagcggctgacagcattactcaaatccccgcagtgaaagcctatagaatagggggatatggcaaagtaatgaaagggcctggttatacaggcggggatttaatggtgttttatggggcaggggaaatcaactggagacttaccattccggacacgacaaaggcttatcgagtgcgagctcgtgtggcaacaatccctacttctcagcctgtagatacagtgaggtataatcagtttgaatacagggatatagaagtaatatctccaacaactactgtacatgagtattccataggattcgatatcactggtgatgactgggggctgttggacaaaatcgaattcatcccaattgaaggatccgtggaagaatatgaagcagaccaagctttagaaaaagccagaaaggcagtgaacgccttgtttacaggtgatgcgaaaaatgccttacaattgaacatcacagattacgcagtggaccaagctgccaaccttgtcgaatgtgtatcagaggagttccatgcccaagaaaaaatgatcctcttagaccaagtcaaatttgccaaacgactcagtcaagcacgcaatctattaaactacggagactttgaatcgtcagattggtctggagagaatggatggagaacaagtcctcatgtccatgtcgcatctaatcatccaatctttaaagggcgctatctccatatgccaggtgcgacaagttctcagttttctaaccatatctatccaacttatgtatatcaaaaggtggatgaatcaaaattaaaatcctatactcggtacatggtacgcgggtttgtcggcaatagtaaggacctagaattactggtagaacgatatggaaaagatgtccacgtggaaatggatgtaccaaatgatattcagtatacgttaccaaggaacgaatgtggtggctttgatcgatgcaaaccagcatcctatccaacaagcacttctcacacatgcacatgtaaagatacggctccaatgcatacggattgtcagtgtcaggacaagatgaatcgtactttggcagatacgtatcacaatgaatcatcgagtcgtgtgatgtatgcggacggattccatgctcatacgtcctgtggatgtaagaacagtgacaggtatcaaaacggaacacgtccatctaaatcttgtggatgcaagaacccacatgtcttcacataccatattgacacaggatgtgtggatcaagaagaaaaccttggtttgtggttcgctttgaaaattgcgagcgaaaatggtgtcgcaaacattgataacctagaaatcattgaagcacagcagttaacaggagaggcgttagcgcgtgtgaaaaaacgggaacagagatggaaacaagaaatgacaaaaaaacgtttagaaacagagaaagctgtacaagcagcgcaaggtgcgattcagaatctgttcacaaacgcgcagcacaatcgtctgaaatttgaaacgctattccctcaaattgtccatgcagagaagctcgttcaacagattccctatgtgcatcacccattcttgagcggggcgctgccaactgtaccaggcatgaattttgaaatcatccaacaactattggcagtgatcggaaatgcccgtgcattatacgagcaacgaaatctcgtgcgtaatggtacattcagctcaggtacaggaagttggaaagtgacagaaggggtaaaagtgcagccattgcaaaacacatctgttcttgttctgtccgaatggattcatgaagcgtcccagcagttacacattgatccaaatcgcgggtatgtgttacgtgtaacagcgcgaaaagaaggcggaggaaaagggactgtaacaatgagtgactgtgcagactatacagagacactgacctttacatcatgtgactttaacacgtctggttcccaaacgatgacaagtggtacattatctggatttgtgacgaagacgctagaaatcttcccagacacagatcgtatccgtattgacatcagtgaaacagaaggtacgtttaaaatagaaagtgtggaactcatttgtatggaacacatggaagaccacatgtatgatatcgccggaaatgtggtggaagagatgcgttacctagattcatctcgttcgatgggtggtacattagatgcgatgtgttatacaaaaattggagagtttggttgttag

SEQ ID NO: 295 - DNA, 1158 bp, Bacillus thuringiensis
  source 1..1158: mol_type = genomic DNA
atgttagatactaataaagtttatgaaataagcaatcttgctaatggattatatacatcaacttatttaagtcttgatgattcaggtgttagtttaatgagtaaaaaggatgaagatattgatgattacaatttaaaatggtttttatttcctattgataataatcaatatattattacaagctatggagctaataattgtaaagtttggaatgttaaaaatgataaaataaatgtttcaacttattcttcaacaaactctgtacaaaaatggcaaataaaagctaaagattcttcatatataatacaaagtgataatggaaaggtcttaacagcaggagtaggtgaatctcttggaatagtacgcctaactgatgaatttccagagaattctaaccaacaatggaatttaactcctgtacaaacaattcaactcccacaaaaacctaaaatagatgaaaaattaaaagatcatcctgaatattcagaaaccggaaatataaatcctaaaacaactcctcaattaatgggatggacattagtaccttgtattatggtaaatgattcaggaatagataaaaacactcaaattaaaactactccatattatatttttaaaaaatataaatactggaatctagcaaaaggaagtaatgtatctttacttccacatcaaaaaagatcatatgattatgaatggggtacagaaaaaaatcaaaaaacatctattattaatacagtaggattgcaaattaatatagattcaggaatgaaatttgaagtaccagaagtaggaggaggtacagaagacataaaaacacaattaactgaagaattaaaagttgaatatagcactgaaaccaaaataatgacgaaatatcaagaacactcagagatagataatccaactaatcaaccaatgaattctataggacttcttatttatacttctttagaattatatcgatataacggtacagaaattaagataatggacatagaaacttcagatcatgatacttacactcttacttcttatccaaatcataaagaagcattattacttctcacaaaccattcgtatgaagaagtagaagaaataacaaaaatacctaagcatacacttataaaattgaaaaaacattattttaaaaaataa

SEQ ID NO: 296 - DNA, 1164 bp, Bacillus thuringiensis
  source 1..1164: mol_type = genomic DNA
atgatagaaactaataagatatatgaaataagcaataaagctaatggattatatgcaactacttatttaagttttgataattcaggtgttagtttattaaataaaaatgaatctgatattaatgattataatttgaaatggtttttatttcctattgataataatcagtatattattacaagttatggagtaaataaaaataaggtttggactgctaatggtaataaaataaatgttacaacatattccgcagaaaattcagcacaacaatggcaaataagaaacagttcttctggatatataatagaaaataataatgggaaaattttaacggcaggaacaggccaatcattaggtttattatatttaactgatgaaatacctgaagattctaatcaacaatggaatttaacttcaatacaaacaatttcacttccttcacaaccaataattgatacaacattagtagattaccctaaatattcaacgaccggtagtataaattataatggtacagcacttcaattaatgggatggacactcataccatgtattatggtatacgataaaacgatagcttctacacacactcaaattacaacaaccccttattatattttgaaaaaatatcaacgttgggtacttgcaacaggaagtggtctatctgtacctgcacatgtcaaatcaactttcgaatacgaatggggaacagacacagatcaaaaaaccagtgtaataaatacattaggttttcaaattaatacagatacaaaattaaaagctactgtaccagaagtaggtggaggtacaacagatataagaacacaaatcactgaagaacttaaagtagaatatagtagtgaaaataaagaaatgcgaaaatataaacaaagctttgacgtagacaacttaaattatgatgaagcactaaatgctgtaggatttattgttgaaacttcattcgaattatatcgaatgaatggaaatgtccttataacaagtataaaaactacaaataaagacacctataatacagttacttatccaaatcataaagaagttttattacttcttacaaatcattcttatgaagaagtaacagcactaactggcatttccaaagaaagacttcaaaatcttaaaaacaattggaaaaaaagataa

SEQ ID NO: 297 - DNA, 3727 bp, Bacillus thuringiensis
  source 1..3727: mol_type = genomic DNA
atgaattcatatgaaaataaaaatgaatatgaaatattgaatgattcaaaaaaatctaacatgtcgaacccttatttacggtacccactagcaaatgattcactagcttctatgcaaaatacgaattataaagattggttaaccatgtgtgatagaactgatactgatgttttaagcagcagaggtgcagttagtacgggggtgggtatgctttctacgattttgagcctttttggcattccacttatcggagaaggaattgatttattactaggagcggcagatttcctttggccagaatccgatggcggccatcaatacacctgggaagacttgatgaaccatatagaagagcttatggatgaacgattagaaactgaaaaaagaactactgcacttgacgatttacgtggtctaaaagctcttttaggtctattccgtgacgccttcgattcttgggaaaaaaatcaaaacgacccgatagctaaaaatagggtcggcggctattttgaagatgtgcatacccattttgtgaaagatatggcgtctatattttcagctacaaattatgaagtattactattacctgtctatgcacaagctgcaaatttacatttacttttattaagagagggagttatttacggaagccgatgggggatagctccagcagctgatttctatcatgaccaactattgaagtatacggccatatacgcaaaccactgtgttacttggtataataatggtttagctcaacaaaaagaactgttcgcaaaatcaccaaactggaaccgcttcaatgcatatcgtagagatatgacaattactgtattagatatcattgcattattcccaacttacgacgctcgtttgtatacaaaaccaataaaaacagaacttacaagagaaatctattcagatgtattgaatttagatgtatatggggtacagcagacagatttgaataaaaatgaggccgccttcacacggtccccacatttagttacaagattacgaggttttgatttttacacaagaactaagtatgcatattggagatatttggctggccatacaaattatttttcttttacgggtaatggtactatttattcaagttcatttaataactggtatgatacagatatgaccaagagtacaataaacattccagactatgctaatatttataagttatggacaaaaagttatacgaatatatctccctatacggacccagttggtatctcacaaatgcaattctctctaacaaataatcagcagttaacttatacgggtacgagtgccccaaagtatcctgtacgcgaaacgttctttgaaataccacctacggatgagaagccgctaacttatgaaaattatagtcacattttatcttacatgactagtgctcaacattttggagataaaaaaataggatatacatttgcttggatgcatgaaagtgtagattttgacaatcgtgttgatccagataaaatcacacaaataccggcggtgaaaggggattatcttcaatatggatatgttaagcaaggccccggtcatacaggcggagatcttgtgtctatgattcgtactgatcgtttagggataaatgtttattttcctcaaccactagactatcgtatacgtattcgctattcaacaagtagtaatggttatctatatatttattcacctaatactaaaatagtatatctcccacccacaaccttagtagatggtcaacctacttttgacccgatggacttcagtgcattcagagttgtagaagttccagctagttttcgtgcaagtgttgcgggctatacaaactttactattgaagcagggtttggcccagtatatatagacaaaatcgaatttatcccagataatacaacaactttagaatatgagggaggaagggacctagaaaaaacaaagaacgcggtgaacgatctgtttaccaattaaaacaaatgattaactagagtaggtggtatcgctgttaaaaaaataagcggaaaaggttgtgaatcctatgtttatcagtaatataaaaaatacgctaaaaatagaaacgacagattatgaaatcgatcaagcggccatttctatagaatgtatgtctaatgaacattcttccaaagaagaaatgatgttatgggatgaagtaaaacaggcaaaacaacttagctggtctcgtaatttactctacaatggtgactttgaagatgtatcaaacggatggaaaacaagtaatacgattgagatccgagagaatagtcccgtttttaaaggacattaccttcatatgtttggggcaagagatattgatggaaccctatttccaacttatatctaccaaaaaatagaagaatctaaattaaaaccatatacacgttatcgagtaagaggatttgtgggtagtagtaaagatctaaaattaatggtaacacgttacgggaaagaaattgatgccatgatgaatgttccaaatgatttggcctatatgcagcctaccccttcatgtggagattctcgctgtgaatcatcgtcccggtatgtgagccaagggtatcctacaccagtaacagatggatatgcttctggtaggtatgcatgccagtccaatcgaggtacaaagcatgtgaagtgtcacgatcgtcatccatttgattttcatattgacaccggagaattagatacaaatacaaacgtaggtattgatgtcttatttaaaatttctaatccagatggatatgctacattagggaatctagaagtcattgaagaagggccactaacaggagaagcattaacgcatgtgaaacaaaaggaaaagaaatggaaacaacacatggagaaaaaacgttgggaaacacaacaagcctacgatccagcaaaacaggctgtagatgcattatttacaaacgaacaagagttacactatcatattactttagatcatattcaaaacgctgatcgactgatacaggcgattccctatgtgtaccatgcttggttaccggatgctccaggtatgaactatgatggatatcaagggttaaacgcacgtatcatgcaggcgtacaatttatatgatgcacgaaatgtcataacaaatggtgactttacacagggactaacgggatggcacgcagcagggaaggcaatggtacaacaaatggatggcgcttctgtattagttctatcaaactggagtgcgggggtatctcaaaacttgcatgtccaagagcatcatggatatatgttacgtgtgattgctaaaaaagaaggacctggaaaagggtatgtaacgatgatggattgtaatggcaatcgggaaacactgaagttcacttcttgtgaagaaggatatatgacaaagacagtagaggtattcccagaaagtgatcgtgtacggattgaaataggagaaaccgaaggtacgttttatgtagatagcatcgagttgctttgtatgcaaggatatgctagcaataataacccgcacacgggtaatatgtatgggcaaagttataatggaaattataatcaaaatacgagcgatgtgtatcaccaagggtatacaaacaactataaccaaaactctagtaatatgtataatcaaaattatactcacaatgatgacctgcattccggttgcacatgtaaccaagggcataactctggctgtacatgtagtcaaggatag

SEQ ID NO: 298 - DNA, 930 bp, Bacillus thuringiensis
  source 1..930: mol_type = genomic DNA
atgatttttttggcaattttagatttaaaatctttagtactcaatgcaataaattattggggtcctaaaaataataatggcatacagggtggtgattttggttaccctatatcagaagcacaaatagatacgtctattataacttctactcatcctcgtttaattccacatgatttaacaattcctcaaaatttagaaactatttttactacaactcaagtattaacaaataatacagatttacaacaaagtcaaactgtttcttttgctaaaaaaacaacgacaacaacttcaacttcaactacaaatggttggacagaaggtggggcgatttcagatacattagaagaaaaagtaagtgtatctattccttttattggagagggaggaggaaaaaacagtacaactatagaagctaattttgcacataactctagtactactacttttcaacaggcttcaactgatatagagtggaatatttcacaaccagtattggttcccccagccaaacaagttgtagcaacattagttattatgggaggtaattttactattcctatggatttgatgactactatagattctacagaacattatagtggttatccaatattaacatggatatcgagccccgataatagttataatggtccatttatgagttggtattttgcaaattggcccaatttaccatcggggtttggtcctttaaattcagataatacggtcacttatacaggttctgttgtaagtcaagtatcagctggtgtatatgccactgtacgatttgatcaatatgatatacacaatttagcgacaattgaaaaaacttggtatgcacgacatgcaactcttcataatggaaagaaaatatctataaataatgttactgaaatggcaccaacaagtccaataaaaacaaattaa

SEQ ID NO: 299 - DNA, 750 bp, Bacillus thuringiensis
  source 1..750: mol_type = genomic DNA
atggaaaatttaaatcattgtccattagaagatataaaggtaaatccatggaaaacccctcaatcaacagcaagggttattacattacgtgttgaggatccaaatgaaatcaataatcttctttctattaacgaaattgataatccgaattatatattgcaagcaattatgttagcaaatgcatttcaaaatgcattagttcccacttctacagattttggtgatgccctacgctttagtatggcaaaaggtttagaaatcgcaaacacaattacaccgatgggtgctgtagtgagttatgttgatcaaaatgtaactcaaacgaataaccaagtaagtgtaacgattaataaagtcttagaagtgttaaaaactgtattaggagttgcattaagtggatctgtaatagatcaattaactgcagcagttacaaatacgtttacaaatttaaatactcaaaaaaatgaagcatggattttctggggcaaggaaactgctaatcaaacaaattacacatacaatgtcctgtttgcaatccaaaatgcccaaactggtggcgttatgtattgtgtaccagttggttttgaaattaaagtatcagcagtaaaggaacaagttttatttttcacaattcaagattctgcgagctacaatgttaacatccaatctttgaaatttgcacaaccattagttagctcaagtcagtatccaattgcagatcttactagcgctattaatggaaccctctaa

SEQ ID NO: 300 - DNA, 792 bp, Bacillus thuringiensis
  source 1..792: mol_type = genomic DNA
atgcaccttaataatttgaataattttaataatttagaaaacaatggtgaatatcactgttcaggacctattattaaaaaaccgtttaggcatattgcattaacagttccatccagtgatataactaattttaatgaaattttttatgtagagccacaatacattgctcaagcaattcgtttaacaaatacatttcaaggagctatagatccacttaccttaaatttcaattttgaaaaagctttacaaattgcaaatggtcttcctaatgcaggagttacaggaactattaatcaaagtgtaattcatcaaacaattgaagtttcagttatgattagtcaaattaaagaaattattagaagtgtgctagggctcgttatcaatagtgctaatttttggaacagcgtagtatctgctattacaaatacatttacaaatttagaacctcaagtagatgaaaattggattgtttggcgtaatttatcagctactcaaacaagttatttttataaaattttattttctattcaaaatgaagatacaggtagatttatggcaatattgcctatagcatttgaaattactgtggatgttcaaaaacaacaattattattcattacaataaaagatagtgcacgatatgaagttaaaatgaaagctcttactgtagttcaagctttagattcttataatgcacccattatagatgtatttaatgttcgtaactatagcttacatcgtccaaatcataatattcttcaaaatctgaatgttaatccaataaaatcgtaa

SEQ ID NO: 301 - DNA, 7305 bp, Diabrotica virgifera
  source 1..7305: mol_type = genomic DNA
acaactgacacataacgtcagtagttgtctattttcactggtgactaatttttgagaattagtaattggtttcgtatttttttcttaacaaaagggcaaaatgagcttttttggaaaattgttcggggggaaaaaggaagagatagcccctagtcctggggaggctattcaaaaactcagagagactgaagaaatgttaataaaaaaacaggattttttagaaaagaagatagaagaatttaccatggtagcaaagaaaaatgcgtcgaaaaataaaagagttgcactccaagccctcaaaaagaagaaacgattggaaaagacccaactacaaatagatggaacccttacaactattgaaatgcagagggaagccctcgaaggagctagcacaaatactgctgtattagattctatgaaaaatgctgcagatgcccttaagaaagctcataagaatttgaatgtagatgatgttcacgatatcatggatgacatagccgaacaacacgacatagccaacgaaatcacaaacgctattagcaatcctgtcggattcaccgacgatctggatgacgatgaattagaaaaagaattagaagagctcgaacaagaaggattggaagaagacctgctccaagtgccaggtccaactcaactgccggctgtgcctgctgatgcagttgctactaaaccaatcaaaccagcagctaaaaaagttgaagatgatgacgatatgaaagaattggaagcctgggcctcgtaaaattcctgaaatctggatatttgtaaacgaaatcacccatctaagatgaaaacattataaatatataggtaataacagctaaaaacgtttcaatgtagaacaagcttttgctgaaaaggcgtcttgcaaaaaatgttgataatttagaattctctatatattatatatttgccctttaaggaaagatttcttttatagtcatagttcaaccaaacgtttcataaattagaatacaggggtgtcagaattctacgtgaatttattgaaaaaaaagaactttccttaaagttggcataatgatatttttgaaattatgtaaataggtatatgtatgctcttactaacggttttaatattgggtttagaagcaccttaattttatttttatacaaggtagtaacattttttcattgtaatttgttaaaaaatattgtataacgcaaaaaatggtgtgataaagcaaaatattattgagtgcttattttcttattttattaaaagatcttatttacgttaaatctaaatatattgggtatctcagaatatgttaacaaaggtttcttgtatcaacagaaaaatacaaacttattcattattgtggttcatttgattatgcttgtgtatatttaatctgccataaacaagttttgataaatgtcactgctctgtactttttgtttttctgactgtagtttctgtcgtttgtaattccttggtctcggccatcgcccatacacacatagggaatgttgtataaaagaaatgatagtagactagcaatggcccgaacagcaagaattaaataattaaaatatggaaagactgaatactaagctgagattggtcaaagcccttatttttcctattgctatatacgcagctgaaacatggactctcaaaaaaatcaatcgaagtaagatcgaagccttcgaaatgtaggtctacagaattattgtacccgtgtcctggagagaacacagaaccaacctgtcaattctgaaagagcttcatataaaagacaaggtattaaaaaaagtataccgaccatacttaaattactttggtaaagtaacgattactatacgaagaggcaaatcgttactttgattactctgattacttcgtaccaatcgtatcagagcgagtaacgactattgtatctactttgattacttcgtatcagagcgaataacgactattgtatctactttgattactctgattacttcgtaccaatcgtatcagagcgagtaacaactattgtatctactttgattattctgattacttcgtaccaatcgtatcagagcgagtaacaactattgtcagggccgcgtttaggtcaaatgacgccctaggcaattctctagtagccgcccttcaaacatgtaccatttttgcgaaaaaaaatgcaagcagaattttttatttaaataagaatgttattgcacaaatctcggtgttcttcaaataatgtttagaaatgtgttaaaaatattctttattttacatcaggcgtaatgttacatattactattataagtatgtttgagcgtttggaactgtgtccaatgcatgcgttttaatgcatgatacgtagaaattgcctgtttgtagccgcacctacttgttcgattttaaatgagagatgcattgaaaacattactcaagcactatgtgtttatagctttgtttaacaataaaaaaattaatttttagcaatgcaaataatcaaaaccggtataatttgacatgcactttcaaatgcggtaagcagaattgctattttattttttaatcaaaagttattcggattcaaaaattgcaatttttcgatattttgaaagttcaaccgcgtctatctcgaaaactatgcatcctacgaaaaaactttaacaacattttttgcttagaatgacccaaaaaaaatagaaaaaaggtttgttttgctaagaatcactgttatgtaattcctcaagttctttgtttataataaccttatccggaaaaaattagactgttttaataaatatctagacaaattgcatatttgtaatgtacacaaaagtacatacaaattaaaagttctaaaaaaataaattttgtaattttatgtcaactatcttaattgagtgcaaaaaatgcaagaaatcgcgttgattgcactaaattgttaataattaaaaacagacgcgaactctaggcaggaaacaagtaggttttcatcctataggtcaacagtcaacaataactaaaaacgtagtcatctacctcaatatttcagtggcccgaacatggtctattttttgcttatttccctggagtaggtatatcagtgtgacgacactaaccttatctacttgtaataatacagtttgaaaatcccaaccctaactcgatgtcctactgtcgacaagtcaaatctttagtttttgcaaaatgtgcaatattgaagtgttcaatggcccaccgcatttgcccagctgccggcggcctaataatcactaaatttatgacttccatcctttttaaatgaatagtgttaagataacagaatgctatgtttgatttatttttgttatgaatgcagtttgttttattctatttagaaatgaatgccaacttctatttcattgatggatgaacatacagacttgttattcgattttaatttttatatacaaatatttttttgtacagtatttttgccgccctctcacaatttgccgccctaggcaactgcctatattgcctaatggatacagcagccctgactattgtatctacaacctgtacacttaaatactttctaccaatcgtatcccagcgagtaacggacgagacacgtattttacgagtgttatcgaatatcgttatcggtttgaaacgttttaagggtgtgagggtgaggagaagatagaagatgaaacagagggagatataatgtataggtaaaatatttaatgtatgtcgctaacaaagatcgaatgcgagaaccctatatttttatctcgatctatatctatacctatacaaaatacctacctactgagaaatacgattctcgatatgattaccggtactcaaatacaaaagtcatcatagtaatcaaagtaacgaatactgtaaatgattactttatacaaaagtaacgatttgtaacgaatactcgacagtaactataatcaacatcactaatagtcggaagaacgtggactatataattattaatattagaaggaaatgccgaagaccaagaagaagatctcgaacacgatggacagaccaaattaagactctggtgggaaaatcacaatatgaaagcgtccatctggcacaggatcgcagccattggatacagcaagctaacaatatttagagtatcaccacgccccgacaaaggctcaaggaatgaggaggagagggttttcatattgaaactaattgtaaaggtgcgtcaagatatgctccgaatgccgtatcgaacctcctcgcgaacttaaatgtggacggcaccctgcaacaacgtactgaacctcgtcgcgatcagggtgcaacatcgaactgttccactagtttccggtaaatccatccacatcaaagtaaagggtcgtcgaaaggttcagaacgaggtttgccgtaaattcacatgtggactagtttgcgaagcattcggcgtttcggtcattgttattttgaaattgagtgcatcaacatggaatgaatggatgagaattgtactactaatagaaaattatcgagaaaacgaaatattatgggaaccaaagagtcccagatattataacaaaataaaaaaataatgcataagtatataagctgatgcagcaacgtccatcttgcagtaaaggtgttaaggcaattactgatggaacatcaaaatgttcggttcgttgcttatttcaagaccccttgcgacaacgtcgcgaacctctgttgatcgcttcgatgttcgcgacgaggttcgatacggcatggcattcggagcatgtgtggacgcacccttagtacaacgagttttatttctgtagaagttttttgacagtttacaaacggtgcgctctatgcttgtatgaaaattaacttttttcttatggttgtatggttatcaaatactattgactgtaaaacatccaactcccacaaaaatctggaagcacgttgccactagcgccactgtcggcttgagttgaactacgttttgacaacgtaaaatttgacgtaaacattcaaatttaattttataaatttttgaataacgagctaattttgctaaattaaattaaaataaaaatagttcaaacacttatacaaaaacaattataaagccattttataaatgtaaggttagattgctctggttatcctactcataccgctagatggcgctatttttttgcttcctcaaagttaatgggaaatgtcaagagttgtgtgtattacagtctatagtatttggtgatagtacggactatgtcataattataatttatgaggccaatcctcgccaatgaagaagtacttcgctgaatgaccggcaaaaggcgttaaaattctgtaaaatgtacaactgacaattatagttcagcgcaaatttaagtacatgcagcatagctgcatgctgcatgattcgcgaggttagtgtgtagagatccagacagcagctgtagattaaaagaaattattatcatgatgcgataggatgcgatggaaaagcttatgggtaaactatgagttaacaaaaatcctcaaatcgatacaagggtttgcaaaagatagttgtaatacgatctaagcaaatcgtacaatagggatgtagtatagtattaatacagtacgaaagtatttattttatattcggtttaaaatttactaaaaataaaataaaatgtcgcgttttagggttttctattatagaaactaccgtttctcaaatatcaataaattttattcaacggtcttccaatgactccatcccgttttctttggtgttcgtctgaaagtgttgcaaatgtctctgttatagccgcaatggcttcttgtttggacgacaagcactgataagaaaaactgacttaaattttaaaaaacagatgaaattctaagagaatcaaacctggaatttagatgggtcttccattacttcatagtgtagatcctcctaatccaagatattttgtggacagtttcattgtcctggcagaaaaggattagtgatcatctcatgatcttgaccttgtagaaaactctatattgttgaattccgatgaaagatgtgcgatatctgagcgattccaagagcttatcagactaccttagtaaatcatgtacagtaagcgccaccctactagatacatgggtaggtacctaattgctatgtttatgtgctagtccggtccgttctcaaatgtgactttcatccctgtcatgttactgtcaagaaactattcaaaataattgtttttccgtacaaaaaatacattaattaatagtattagtactctgctttaaaataactttattcaaacaccaagaatattacaatactttaaaacttttacaaaacaaaatgacaactataaacgtcaaaattagatcagctgatctattatttgtcaacttcatatgttaatattgtccttttcatgatcatttttcagtgcgtaacaaatgataggagaaagggtaagtccgtgataatacacatttatgacatttattctaacatgacattttagttaaatctgacagttgtcacattttattttcaatttggaataaaaacaaagcaaatgtgtttcttgcatttataaaatggtattttctttgatttgtatagtgtatagtcttataaattatacagattatatttgtaatattattatctaattaaaaaaaattatttttttattatggcgccatctatcgacaactaaaataactagaagaaatgttataaaaatgtcaccgacgaaatgtaatcaccgacgtgcttttttttctgtctcatacaagttaatgtgttagaaagaaatcgaaaaactgtgacgcactgaaagatgatcatgagaaataatttattcagtttctatacattttctgacgttctaaacgtcactagacataaataaacaagtgaagggtccaggactgtaatagctctatgttcctatgtatctagtagggtggcgcgcactgtataattggattattattcaatttgtctactgtaacgtctcggttcttaatacaactcctggctttttttatttattttttgtatttttttttcagggaaccttttttatctagttatttttttataataatagtaaaccatgatttttatttttttcccaattgagtgcatagataaaagcgcgtttgcatatatgggacacccagtattaaaaaatatgcattacatttttctttacttggaccttgtgtacctgtaacctacattcaccaaattgtgttttgtattctaattttaaatacagtaatatattttgattcactta

SEQ ID NO: 302 - DNA, 1093 bp, Leptinotarsa decemlineata
  source 1..1093: mol_type = genomic DNA
cattattgggttggcgacactgtgaatgactaatagtagttggtctatcagccataatttgttgcttgtttagtgcaaatatgagttttttcggtaaattattcggtggcaagaaagaagatgaaggggcctcgcctgcagaggcaatacaaaaacttagagatactgaggaaatgctcattaaaaagcaagactttctggaaaagaagattgaagaatatactctaatagcaaagaaaaatgcatcaaaaaacaaaagagtggccctgcaagccctcaagaaaaagaagcgattagaaaaaaatcagttgcaaatagatggcactttaactactattgaacttcaacgagaagctctggagggagctagtacgaacaccacagtattggaatctatgaaaaatgcagctgaagctcttaagaaagcccataaaaacttggacgtggacaatgtgcatgacatcatggatgacattgctgagcaacatgatattgcgaacgaaatctctaatgccatcagcaacccagttggattctcagatgacttggacgatgctgagttggagaaagaactagaagaacttgaacaagaaggtctggaggaagatttactcaaggttcctggaccgacggaattgccagctgtcccaactggcgccattgccaagccagtcaaaccagctaaaaaagtggaggaagatgacgatatgaaagaactcgaagcttgggcctcataaaatgttcatggttgctaggtttgttgaaattttataaaaatatgtaggcacccatctaacccaagagattcaaagttattaatatatcactgaagtggagttgaatatcttgtttattggtggtgtaaataagaacccaactcttgatttctcctccgaaggcttgggatgcttctccataatgtatatatatcttttattttgtttacaaaggacaactagcagggtcctcaaaagattaaaactccatttgttaggaattatatatttttagcataattgcagtaatttcagagttgcctagatgcaagcttttggtaattcaaatttttctttaataataaagtatatttaca

SEQ ID NO: 303 - DNA, 488 bp, Leptinotarsa decemlineata
  source 1..488: mol_type = genomic DNA
atggtcggtatgggacaaaaggactcatacgtaggagatgaagcccaaagcaaaagaggtatcctcaccctgaaataccccatcgaacacggtatcatcaccaactgggatgacatggaaaagatctggcaccacaccttctacaacgaactccgtgtcgctccagaagaacacccagtccttctcactgaagctccactcaaccccaaagccaacagggagaagatgacccaaatcatgtttgagaccttcaacacacccgccatgtatgtagccatccaagctgtactctccttgtacgcttctggtcgtaccaccggtatcgtcttggactctggagatggtgtcacccacaccgtaccaatctacgaaggttacgctcttccccacgccatcctccgtttggacttggctggacgtgacttgaccgactacctcatgaaaatcctcaccgagaggggttactcattcaccaccacagctgaaag

SEQ ID NO: 304 - DNA, 2472 bp, Leptinotarsa decemlineata
  source 1..2472: mol_type = genomic DNA
gtcagctgactgtcttgtgacaaatttacttgcttggttaaaagttgatagtccgtcgtcttgcgagttgtgaattgactgggtgaggttgaaagtgatacaagtctacattcataatgtcgagattaattgctgatgaggaacaggaatcacagtatggatatgtccatgctgtatctggaccagtcgttacggccgagaaaatgtcaggatcagctatgtacgaattggttcgagtaggatactatgagttagtaggcgaaattatccgtctggaaggtgatatggccaccattcaggtatatgaagaaacttctggagtaacggtgggagatcctgtgttgcgtaccggtaaacctctatctgtggaacttgggccaggtattatgggttccatctttgatggtatccaacgtccgctgaaagacatctgcgacatgacggaaagtatctacattcccaagggtgtgaatgtgccttcactctccagaactatcaaatgggaattcaacccaatcaacatcaagttgggatcccacttgacaggtggagatatttatggtatggtccacgaaaacacccttgttaagcacaaaatgatcctcccaccaaaatctaagggaacagttacatacgtggcagaaccaggaaactatactgttgatgaagttgtattggaaactgagtttgatggagaaaggtctaaatacactatgttacaagtctggccagttcgacaggcaagacctgttagtgaaaaactcccagctaatcacccgcttctcacaggacagcgtgtattggactctcttttcccatgtgtgcaaggaggaaccactgctattcccggtgctttcggttgtggtaaaactgtaatttcccagtcactttccaagtattccaactctgatgtcattgtgtatgtaggttgtggagagagaggtaatgagatgtctgaagtattgagagatttccctgaactgactgtggaaattggtggtgagaccgaatctatcatgaaacgtaccgccttggttgcaaacacctccaacatgcctgtcgctgcccgtgaggcttctatttatactggtattaccctgtctgaatatttccgtgatatgggttacaacgtttccatgatggctgactctacatcacgttgggctgaagctttgagagaaatttcaggacgtttggctgaaatgcctgctgattctggttacccagcctacttgggtgctcgtcttgcctctttctatgaacgtgctggtcgcgtcaaatgtttgggtaaccctgacagagaaggatcggtttctatcgtaggagcagtatctccacccggtggtgacttctcagatcccgttacttcagcaactttaggtatcgtacaagtgttctggggtttggataaaaaacttgcccagcgtaaacatttcccatctattaactggctcatttcttattcgaaatacatgagggctctggacgatttttatgacaagaacttcccagaattcgtatcactcagaaccaaagtcaaggaaattctccaggaagaagaggacctctcagaaattgtgcaactggttggtaaagcctctttagccgaagcagacaaaatcacccttgaaatcgccaaactgttgaaagaagacttcctccaacaaaactcctactcctcctacgacagattctgcccgttctacaaaacggtaggcatgctcaagaacatgatcggactgtacgacatgtcgagacacgctgtagaaacgaccgcccaatctgaaaacaaaataacctggaacgtaatcagagactccatgagcaacatcctctatcagctcagcagtatgaagttcaaggaccccgtcaaagacggagaagccaaaattaaagcagacttcgaccagctctatgaagacatccaacaggccttcagaaacttggaggattaagtgggggtcgcgtaggactgtgcagcttggggttttaggtttcgaagatgtttctctggaactgcacttggtcactatcagaaggcctctgtccctcactctgggtattgtcaaccagcggaagtagtaataatggggttttcccttttgatattatcatgtataataataaatcatgtaaatttttcgagtatgtgtatagtttttgagatttcttggtgagggtaagtgttgaaaactataatttttcccatcattccagttacttttaagtttgattttttttttcattgaaataggtgcttatcagttgtccagtattatcgatttcattgaactgtggccattttcgaaatcatttacacattttaaagctgttgtacattatatttacctttttaaagatatatcttactattgtacagtttaccatgtatccaatgtctagaggtttagaacttttgattgtagtgctattgttctgttttgaacgataataaacatacatactgttgtt

SEQ ID NO: 305 - DNA, 1686 bp, Plutella xylostella
  source 1..1686: mol_type = genomic DNA
atggcagcagtagcagcagcccagaagaaccgcgagatgttcgccatcaagaagtcctacagcatcgagaacgggtacccgtctcgtcgccgttcgctggtggacgacgctcgcttcgagaccctggtagtcaagcagaccaagcaaagcgttttggaggaggcccgtgcccgcgccaatgactctggcttggattccgaacttatccaagacgatgtcctgattggcaccggcgctgtcactccaactgttgaggtgggcactcagcaggacgacactaaagatggtcaactcgccgatgcggaggtcggtggaatagacggaaatgcagatgacgattacaccttgaccgaggaggaggtgatcttgcagaactccgccagcgagtccccggaggccgagcaggcgctgcaacaagcggctttgcttctgcgcctgcgcgacggcatgggctcgctcgcgcgcatcctcaagaccatcgacaactacaagggctgcgttcaacacctcgagacccgcccctccaacgccaacgacatccagttcgatgctctcatcaaagtgagcatgtctcgcggcaacctgctccaactcatccgatctctccgccagtccaccgccttcgccggcgtcgacctcatctccgacaacgtctccagcaagaccccgtggttccctcgccacgcttccgacctcgacaactgcaaccacctgatgaccaagtacgagcccgagctcgacatgaaccaccccggcttcgcggacaaggagtaccgcgcgcgcaggaagaccatcgccgagatcgccttcggctacaagtacggcgacccgatcccgcatatcgtgtacacggagaccgagaacaacacgtggtcgcgcgtgttcaacacggtgctggacctgatgcccaagcacgcgtgccgcgagtacaaggcggcgttcagcaagctgcagggggacgacatcttcgtgcctcaccgcatcccgcagctggaggaagtgagcaacttcctgcgcaagcacacgggcttcacgctgcgcccggccgccggcctgctcacggcgcgcgacttcctcgcctcgctcgccttccgcgtgttccagtccacgcagtacgtgcgccacaacaactcgcccttccacacccccgagcctgactgcatccacgaactcctcggccacatccctctgttggccgacgccagcttcgcccagttctctcaggagatcggtctcgcttctttgggagcctctgacgctgaaatcgaaaaactgtctaccgtgtactggtttacggtggagtttggtctctgcaaggagaaccagcaactgaaggcttacggcgccgctctcctgtcttccatcggggagctccttcacgcgctgagtgacaagcccgagctgaggtccttcgagcccgcgtccacctccgtgcagccctaccaggaccaggagtaccagcccatttactacgtcgctgagagcttcgaagatgccaaagacaaattcagacgctgggtgtcaaccatgtctcggccgttcgaggtgcgcttcaacccgcacacagagcgtgtggaagtgctggactccgtggagcagctcgagaccctcatctcccagctcaacaccgagatgctccacctcaccaacgccgtcaagaagctcaagggctcccacttcgagtga

SEQ ID NO: 306 - DNA, 1044 bp, Diuraphis noxia
  source 1..1044: mol_type = genomic DNA
cagaagattgttcaaacacatatatcgtcgtttcgttctggataccgattattcacaacatgggaagttacaaattatacctggccgtcatagcaatagcttgcatagctgcagtacaggaagctagttgctctgatgagcaggtacagtacgatgatgrggaagaagtgatcggattagagaaagagcaggaagaagtgtccgaaccagatatggaggaaaaagaagagccagaatcagagatggagtaccatcagtgcgaggaatacaaatcgaagatttgggacaatgcatttagtaataaggatgctatggacatgatgaaactgacgtttataacagctgagaaaatgggctccgacgccgtgtgcactgacacagcccgggccttcataaacttcatcgaagtgatggccaccaacagtaactcccaatacacgagaagtatgttcaaaaagttggtggcgtttattgttagagagttgaacacgacgtcggacaatttcagagagacgtcggaggtgttcgaacgtatctggacaactccagagattcgtgactttatcagggactcagtcactcggaccaataacgtgctcaaggagccccgtatgagaagccgactgttcaaagtgattgaagcagctatggatctgatgtcgaaatccaaagacggagaatcaatgaaacagaagtttaaggggatgtacagagctcccaccaagatggcaaggagtgccatggataaggttggaaatttctttcgaaaactttaataagaatgtccatacagactagtgatatatatatatatatatatatatatagcatatacatatagataaacataaagtgcagattttctaaaaaaaaatgttaacctaaaatctcacttccccgcctctctgagagtcgtcttcagtgttttgtacagtatcattacacattcggtatatctaacataccacacaccgcgttgttcttgcaataaatattgttattgttattattttattttgttctaaataaactcaattgattaac

SEQ ID NO: 307 - DNA, 3085 bp, Acyrthosiphon pisum
  source 1..3085: mol_type = genomic DNA
tgaacctgcaataatcgccgccaccgacgcgacgtacagaccggtccgtgcagtgtcccttagttgtacttgtgcgctttttgtgtgtcggtcacgtgcggatttcgcacaaacgttttgattttttcacatcgtatatctgttattgtctccacgcaataattattgcactcgccgcagtgttgcatccattcagtagaaacaatattggcacctattttatagaggctcgcgccgttcgtatttatagttattataaatatagtgcccgaacgacttcgggctcgtccgactttcgtggattttatatcattaatttttttatcgtcgtcgaaatgctgttaatcttgaatagtgatccgttgtcgtatccgtcaccgatccatgtgtcgacgatttaaatctagaagaaattcgtccaccacggtgtccaagacctcacactcactatttaccagccggctcgacctacaaatgacttattgttgatcgatcatcagagaaaactcgcacgcttaaacaaaaaatgtttttggaaaacgaacaccagccaattattagccattcaccgtacgacctagcacgtccacttgaacaccatcaccatcatcacctcaaccatcacgccgcgtccaatcatcttcagtcgagcaccgaccacttgcaagaagattcggaaggccggagtacggctagctcgccgacgtccagttaccgcgacctgtccgggtgcgaagactttgatctgaaaatcccgaaaccgtctggtcacgggtctggcactggtggaaataacaacaacaataaccacaataacaacaacaacaaggaacaaaaaccgaaaaagcacaagtgcaaacactgtgggctggagtgcacagaaaaggtgcagtactggaagcacattcgcactcacataaaacctgaacagttgctggagtgcccaaactgtgagttcgccaccgacctgaaacaccactacgaataccacctgctgaaccacacgggtgccaagccgttcacgtgcccggactgcgactacaagtgcgtgagcaagtcgatgctccaatcacacctcaagtcgcattcgaacgtgttccagttccagtgttacgactgtggttacgcatctaagtacatgcacagcctcaagcagcacctgaagaagcgcgaccaccggccggccacgccgctcaacccagacggcacgccgaacccggacatcgtcatcgacgtggtgggcaaccgacgcgggccgcggcagaacaagaaacaaaaccggcacaacccgtatcagcaacagcaccagcagcaacagctccagcagtctatgacggtgtgttcgtcgcaggacgacggcggcagcagtagcggcggccacccatcaccgtactcgatgcaacagctgttgcagatgcctgcttccggatgcgcccaagttacgtatccgacctcggccgagtcgtttatgtattcgatgatcactaaacgctccatggagatggttgattaccaggccgccgaatacatggccatcaagaacaacaacaataataacaactcctcgtcggtcgatgataagatggaagtgcaacagcaccaccaacaatcactacaacaccaccacaacaatcatcaccataaacgcggccatcagtaccattcagatgacgtgctgaaagtggaattggctgggcgtagcggtagtggcggtgaactgacgcccgaaccacatgtacctgtgttggcggtcgccgatccttcgcccccgaccgtcgttttggccatcgagacgggaccgttgaacttaagcagagactcagtggctcctcgcgccgcgggcagcagccggcgtaaggggatcgcgtgcaaactcgagcgaccggcaaccgaatcgcagcctaagtcggtgtcggtgccggtggtggttgttccggtgtcgcctgcagtaccgatggattgcagtagcgagtcaagaggaatggtggaggagactttgattccggtaaaggaagaatatcaacagtaccaccactaccatcagcagcagcagcagcagcagcagacgtcgtcattgtcttcgacgcctgaaaaagaagacaaggaagacgagacgcatgtgtgccaccactgtgacataatattcaaggagaacatcatgtactcgatgcacatgggtttccacagcttcagggacccgttcgcgtgcaacctgtgtggcgagataacggcagataagttttcgtttttcgctcacatagcgcgcgtgccgcacagttaggctgcaattagaagacgcacctacgaaagatacgaaataataatagagtacaaattttaaaacaattaaccctttaggtatgtaatataggatttatcgtaagaaaaaattaaaacagattaagaatataaagtaatgttacataggtactatattatacatctctttctttttaataactgtcccccccaaacctaagagtgtagttacgccgcacccatgcttcgtacaaatgaaaatcgtttttggcgcttagctaaaaacgattttaatttgtatacctacgcggccggtgttgttgaacggttccggttcttaaacgttgatttcaacttatcaacgtgtaagagtcggcaccgtgtcttcaaatcgtgattgcgcacattaatcgtcgagatgcttagttgtttatcgttttaaatatttttttctcgttatatttttctcggaaataaaattttaattatgttttaattttattttcgaggaataaaagccatcgccaattttagcgatttaaaaatgtttaactcgtgtcctcatagttaagcacaaattattagtttatttgttacatgtaaattttattatccttaaaaataacttttttaactttccaattacccaagattgaatcaataatgacaaatattgattttttttacgtttaaataccgtaatacctcatcttcttcattattttttattgtttgatctagtcgttaaactatttctcctcgtatactatagtttagtatcgtgtatacctatgcacttatgatagatactattaaaaataaaaaa

SEQ ID NO: 308 - DNA, 2383 bp, Botrytis cinerea
  source 1..2383: mol_type = genomic DNA
atgtcctataatcgattagatccggcgggccaaggccaagacgattattacaatatgaataatagacatcaatcgccgcaccctcaagggtaccaactagaagatgcgccatatggcagaccaaatactacttcacccggtcctggaatgcacaatctagagatacctatgggtcctggggcacatagaattggaacgccgagtgatcaattgcaagctcaaccatcttattcggtcgaacatttagatcaaaatcaataccatcagcgcatgtccctcaatcccagtcaaagctacgactcggaatattctttagatcctaacgcgcatcacgatgcttactaccaacctccataccaaccctctcctcatgaagaacaccctctacagaactatgccccagggcaagacccctacgcttacaatgatgatgatgaccatcaaccaattctacaatcgcatgaaccttatgggccagatccgcactcagctagtggcactgattacaaaggtggttatgacgggacggtacaatctccatcagcgacacctgtacctgcgttgagaagatacaagacggtcaaggaagtccaactgttcaatggaaatctcgtactcgattgtccgattcctcccaagcttttaaatcaagtcaatcatgcaccaccgccggagagagatgagttcacacatatgagatattcagccgcaacatgcgaccccagtgagttttttgaggagcgctttacattgcgacaaaaactctttgcaaagcctcgacacacagaactcttcatcgttgtcacaatgtataatgaagatgatgtattgtttgctagaacaatgcacggagtattcaagaacattgaatttatgtgcactcgtaaagacagtaaaacatggggcaaggatgcttggaagaagatcgtagtgtgtgtggtcagtgatggacgtgctaaaatcaatccaagaacaagggctgttttggctggtttgggggtttatcaggacggaattgcgaagcaacaagtcaatggcaaggacgtgacagcacatatctatgaatatacgactcaagtcggaatttctttgaaaaaggatattgttacactcacaccaaaacagcaacccgttcaattgcttttctgtttgaaggaaaagaatcagaaaaagatcaactctcacagatggttcttccaagcctttggtagagtacttgatcccaacatttgtgtactcctcgatgctggtacaaaaccaggaaaggactcaatttatcatctatggaaagctttcgatttggaaccacattgtgcaggagcttgtggtgagatcaaagctatgttgggcccaggaggaaagaatttggtcaatccattggttgctacccagaatttcgagtacaagatgagtaatattctggacaaacctcttgaatcggcatttgggttcatttcggtgttgccaggtgctttttctgcatatcgatatgtcgctttacaaaacgataaaactggaaatggaccactggagaagtactttgcaggagagaaaatgcatggagcaaacgcgggtatttttactgccaacatgtaccttgccgaagatcgtattttgtgtttcgaactggtatcaaagagaaattgtcactggatcttacaatacgtcaagtctgctactggagaaaccgatgtaccagatacaatggcggaacttattttgcaacgtcgaagatggcttaacggaagtttcttcgctgctatctatgctcttgctcatttctatcaaattttccgaagtgatcacagctttttacgaaaaatcatgtttttgattgaattcacatatcaaactattaacatgatcttcgcttggttcgctcttggtaatttcttcttggtttttcacatcttgactacatctctcggaagttctgacttactgggtaacgttggtgtaattcttggtgttgttttcgaatggctttacttgtttacgcttttgacctgttttattctggcgctgggaaatcgacctcaaggaacgaacaaagtttatatgtctatggtttatttctggatcattatcatgatatacctaatgtttgcttcgattttcatcacagttaaatcaatccaaactcaacttgctaaagacgaattcaactggacggatattatcaagaatcagatcttctatactctgatcatttctctcgcctcaacttatctactctggttcatttcttcctttttattcttcgacccatggcacatgtttacatctttccttcaataccttcttctcactccacatatatcaatattctcaacgtttacgcttttctgtaacactcacgatattacatggggcacgaagggaa

SEQ ID NO: 309 - DNA, 2736 bp, Botrytis cinerea
  source 1..2736: mol_type = genomic DNA
atggcgtactctggaaacggaggctatgatgagcataagctccaagaccttccacctggagggggcaactaccatcaccctcaagatgaagaggaaggagctttacctttactcgattctggaggacatggcggcccattcaacagcccttacgactctcactcccaaggaggccttcgagcgaatactcctccagtcagacctgtttctgcctacagtcttacagaaacgtatgcgaacgatccacaaccatacagcagcgattacaactcatcccacacatacaatgagcagttagaagataacccatacccacaaaccgacactcctttgtcaagagccgggactacctccacagaggcatggagacaacgacaagcccctcaggctggaggtctcaaacgttatgctacaagaaaggttaagcttgtccagggaagcgtcttgagtgtcgatcatccagtacccagtgctatcaaaaatgcaattcagcaaaaatacagaaatgatttggagggtggcagcgaggaattcacacatatgcgttacaccgctgcaacttgcgatcccgatgaatttactctgaaaaatggttacaatctacgacctgccatgtacaatcgtcatactgagttgctcattgccgttacctattacaacgaagacaagcagttgactgcacgtactcttcacggtgtcatgcaaaacatccgtgatattgtcaacctcaagaaatctgatttctggaatgtcggcggaccagcatggcaaaaaattgttgtctgccttgtttttgatggtatcgatccttgcgacaaagacacactcgatgttcttgctacaattggtatctaccaagatggtgtcatgaagaaagatgttgatggaaaggagactgttgctcacgttttcgagtacacaacacaactttcggttactgccagtcaacaacttatccgcccaaccgagggtgatgccaactgtcttcctccggtgcaaatgatgttttgcttgaaggcaaagaacacaaagaagattaattcccatagatggctgttcaatgcatttggtcgtctccttaaccccgaagtttgcatccttttggatgccggtacgaagccaggacctaaatcgttgttgtctttgtgggaaggtttctacaacgacaaagatctaggaggtgcttgtggagagattcacgctatgttaggaaagggaggcaaaaagcttctgaacccgcttgttgcaggtcaaaacttcgagtataagatcagtaacattcttgacaagcctctagagagttctttcggatatgtcagtgtgttgccgggagctttctctgcataccgattccgagctattatgggacggcctcttgaacaatacttccacggagatcacactttgtccaagattcttggaaagaagggtatcgagggaatgaacattttcaagaagaacatgttcttggccgaggacagaattctctgtttcgagcttgtagccaaggctggtagcaagtggcatttgacttatatcaaggcagctaaaggagaaactgatgtacctgaaggagctgctgaattcattggtcaacgtagaagatggcttaacggttcctttgcagcaggaatgtattccatcatgcatttcggcagaatgtacaagagtggtcacaatattgtccgcatgttcttcttgcacattcaattcttatacaacgtcttctccaactttctcagttggttcatgttatcttctttctggctcactactactgttattatggatcttgtcggtacccctactgctgcttcggacactactgcccttcaccatggctggcctttcggtgatactgctacccccatcatcaacacgattctgaaatatctctacttgggattcctactcgttcaattcattctggctcttggtaatcggcctaagggatccaaggctacttatattgtctcctttgtcgtttttggtgttatcaatctctacgtccttgttctatccatgtatctggtcgttcgtgctttctcgtcaggagatagtctcgatactagtagtgcgaaagatttctttgagagtttcttcggagatagttcgagttccggagctggtatcattattcttgctttagctgctacatttggattgtacttcgttgcatccttcatgtatatggatccatggcacatgttccattctttcggaccgtacttgttgctcatgtcatcttacatcaacattctcatggtgtacgctttcagtaattggcacgatgtttcttggggtaccaagggatctgataaagcagaagctcttccgtcagctaaaactacgaaggttgatggtaaagcagcagtcattgaagaaatcgacagaccgcaagaggatattgatagtcagtttgaggcaactgtcaagcgtgctcttagtccatttgttcctgaagttgaagatgagagtaagaccttggaagattcttacaaatctttcagaaccaagcttttgatctcttgggtattctcaaacgcgttgttggctgttgctatcactagtgacagtgttgatggatttggtttcggaaatactgcatcaataagaactgctaagtttttcgaaattttgctttactcaacggctttcttggcacttattcgattcctcggatgttcttacttcttgttcaagtctggtatcatgtgctgcttcatgagacgttaa

SEQ ID NO: 310 - DNA, 2715 bp, Botrytis cinerea
  source 1..2715: mol_type = genomic DNA
atggaaacatcaaggagctggaatagttcggctgaaaactatcctatgaatgaacttattcaacattcaaacaattctgttactgatcctgctacacagttagataacactgatcatattagtgatgtacatcactcaaatgatgctcatgatgttggtgaaagtttgctatcagatactagtggctaccatccaacaacaccctatgtgactggtactgggcaggtacaacgtcaacgttcaccaaccagctcagtgaacggtgaggaatttttcggggatcaacaccatcttccagatatcgaccaggacttctacagaagccccgaagactcctttaatgcgcaagacatgccgtccgcgaacggtgctcgtggagctcttcggcgccgcgctactcgaaagattaaactgattcaaggcggtcagggatctgtcttgagcgcaaactaccctgtaccaagtgcaatcaagaatgcattacagccccagtacagagatatagagaatggtaccagcgagttctcagagatgcgatacaccgcggtaacttgcgacccgaatgattttaccttgatgaacggttatacactacgccagcacatatacaaccggcacaccgagcttttgattgcaatcacctactataatgaggacaaggtgctattcgctagaaccttgcatggtgtgatgaagaacattcgcgatattgtgaatctgaagaagtccaggttttggacgcagggttccgcagcatgggagaaaattgtcgtctgcctagtgttcgacggtttcgaaaaggcggatccaggtgtgctcgatctcctcacaaccgttggagtatatcaagacggcgtgcgaaaacaggatgtggatggaaaggagacgacagcccatgtcttcgagttcacgacacagttatccatcactcccgacctacagctttctcgtcccaattcggatgtggatgattccagtaacttgcctccagtacagctcctcttctgtctcaaacaaaagaataccaaaaaaatcaactcgcatcgttggttgttcaatgcctttggacggattctcaacccggaagtcaccattttgatcgacgcgggaacaaaacctggacctcgctctttattggccttatgggaggcattctataacgacaagaaccttggtggcgcatgtggtgagatccacgctatgcttgggagccggaactccaagttactaaatccgcttgtggcaatacagaatttcgaatacaagatttcgaatgttcttgacaaaccccttgagagctccttcggctacgtcactgttctccccggcgcattttcagcatatcgctttcgagcgatcatgggccgtcccttggagcaatattctcacggcgaccatacgttgttgtctggcaagaaaagtatcaacaacatgaatatttttaaggagaatatgttccttgcagaagatcgtatcctttgtttcgagctagtagtgaaagaaggacagaattggcacttgtcttatgtcaaagctgccaagggcgagacagacgtaccggaaggccctgctgagtttctcagccaacgccgccgttggctgaatggatcatttgcggcctcgctatactcgcttattcacttcggtcgcatgtacaaatccgggcacagtctgctccggatgataatgtttcatttccagctgctatacaacattgccaatgttatttttagttggttctctttatcatcctattggctcactaccactgtcatcatggatcttgtcggtacacctgtaactgcatcgaactatcacggctggccgtttggcgatactgcgtcccccatattcaaccacgttattgaatatatttaccttgcgtttgtgatcacacaattcattctggcccttggaaatcggccaaagggatcgcaagtgacctatctggtgttgttcgtggtgtttggatttattcagctctacatcatcattctgtcattctatctggtttaccgggcactacggactcccattggggaacagatcgacacgtcttcggccgcagcattctttgagagcatgtttggaggaacgggagtcgccggcgtgattttactagccttggtcaccatttacggcttgaactatgttgcctcgttcctctacttggatccttggcatatgtttcactccttcccgcagtatatcattctcgcttcgacatatattaacattttgatggtgtatgccttcaataactggcatgatgtttcttggggcacaaagggctcagatgaaagcgaaaagctcccttcggccaatgtgatcaaagactcgaaatccggtgtcgagatggtcgaagaagaggagatgcaacaaacagatattgaccagaagtttcaggagaccgtgctaagaactctggcccctgtcgaagtggaagttaccgtagaaaccaaggaggtcgatgacacgtataagtcgtttaggacccgcttggttgtctgctggatcctgtcgaatatgctgctggtcgggattgtcacctcggatgatttcgcatttcttggcgttggtcctctacgacccggaccgccatactacttcaaatttcttctatatgccactgctttcttgtcgattatcagattcttagggtttctttggtttctcggacgaacaaacattatgtactgctttgcgaagaggtaa

SEQ ID NO: 311 - DNA, 4648 bp, Botrytis cinerea
  source 1..4648: mol_type = genomic DNA
aaaccttccttccgagccaggatatcgagctttcgacgtcttctactacctcctcacatctgcatcgactcctgccgaacgagaattcttgagcttaaagcaagcttctagttacgcgcttctagaaaagtctggaacatatggccctccaccgtaccttcctactgcggatgatgctgctgctgcagacgacttcagagcatcattaaaagctattggtatcaagggtgccgcacacagagatctcatctcaatattagcaggattactaaagctaggtgataccttgagctttgttcttgatggggatgcgttggaggaaatttgtgaggatgttggaggtctgcttggtttggaacccgatgttctcgtcaagcaatgcacaacccaagagcgagaaactttgatcggtggtctctatgaagcccttgtagattgggtaattctgaaggccaacgaagccattgctagtgagatgctcaggatcaaggacggtgattcttccagtgaagggggaccaggagctcgaaccccaaatacagaagacgacaatggtgatactgtctgcataactgttcttgagattccagacccaaatcctgggaaagcggctgcagtgcgaggtgtctttgacgatactcagggtattaattccgaaatgaaagaagatggtgtggatgtagtttctgctggctcaacggttatccgagagatgcaaaatgctgtatccgaagttgctccagatctcggtatcatgactggaccttctgggagagatcgtgaacacgagcttgagaagcgtgagatcgtattagagaaggttgcccgcgagggagaagatgatggtttcctcaagaagcttctgctcccaatcgagggtcaaggtattaacctaggccgcaacggtcgtattgacctaccttccgttcttggtagcagtcgcgtctggtatcacttatctatgcatccgaccgacgattcacccgcagctctcgcttcgcttccttcaacaacttcggcttggtccgcgggtgctatctcacgccaactccgcgcctggcgtttgccagagtgggcaaatcgacgaaacaaaaacttggattttacagccgatttcgatttcgaagaatttgttcaacgatatgccccccttggttgtaaggatggccgtgatggcattgaaagctgggtcatggagcgtggttggagcaatggtgaagttgtcataggcaaagagcgaatatggatccgcgaaagtgcttggtgggaagctgaaaccatgcttgacctaaagccggccgaaggggagttccaaagtatgggcggtcctggaggcatggcaggcatgctaggagcccacgacatgaacacaggatactcctccaacccaccaaatggaagtggtttctttgccggtcccaataatgatctgacgcctcttgggagtcacgataatatgatgaatcgacaaagtcaagtcaacgtggcccggagtaacctcggggctcccaccatcgcaccatcaagaaatatcagtggtggtgactatggactcggcttcaagggagataatacgaggggccaggtttattacactgatgagaatggagaaatggtggatgatcccgaaggtggcaccccgaaagctgtcgtcagcgaggcagcaacaaaccagcgtcgtatctgggccgccattacctgggctttcacgtggtggattccttcattcctcctctcatttattggtcggatgaaacgaccggatgtacgcatggcttggagagaaaagctagtgttgtgtttctttatcctcttcatcaatgccttggttattttctggattattgaatttggtaaactcctctgtccaaattccgataaagcgtggaatgcaaaagaagtcgctactcatcaaggagataacgatttttgggtcagcattcatggaaaagtatacgatctttccaagttttggaagttgcagcacagtgataccactgtcgagacaacctctgatgttatgcaaccatttgctggtttgaacttggacagttacttcccgccaccattgactgttgcatgccctggccttgtaaccgattacaccgtggttttactggacaatagtactgttgaatatccttccggggtccatacatctggcaacctttcagcatatacaaccagtaaactttacgactggaattggtatgcggacgtgtacacacctgcaatcaaagagtattaccatggtgatctagtggtcaagaatagtgcgatcaagagtgaaggccaaaatgaaaatcattattgggttatatcacgagtgatggatgacaattacaaaacagccaacgcatcttatcaagtggatatcctcaacaacttgaattgcatgaacaatttgttctatgcaggcatccctgattttcgagattctattagatgtcagatcaacaactacatccttctcgctttcacaattattgtgtgtgctgtcattgtcgtcaagttcgtgtctgcacttcaatttggttcgaagcgtcgtccaactcctcaagacaagttcgtcatttgccaagttccagcatacaccgaaggtgaagactcattgcgtaaagctttggactctgttaccgctctacaatacgacaataaaaggaagctcatctgtgtcgtttgtgatggcatggttgtaggaggtggtaatgatcgccctacaccaaagattatcctcgatattctcggtgtagatcccaagatcgaccctccagccttaccgtttaaatccgtcggagatggcaacgagcaactcaactatggtaaggtatactcaggtctatacgaatttgaaggaaatgtggtaccatatattgtagtggtcaaggttggcaaggaatccgagcaatccaaatcgaagcccggtaatcgtggaaaacgtgacactcaaattattctcatgagtttcctcaatcgcgtccatcacagagcacccatgaacccattggagttggaaatgttccatcaaatcaacaacattattggcgtagatccagaactttacgaatatctactgatgattgatgccgataccagtgtaagggaagactcgctgaatcgtctcgttgctgcctgtgtcaatgacggtaaaatcgctggtatttgtggcgaaaccaatcttgaaaacgaagagcaatcttggtggactatgattcaagtttacgaatatttcatctcgcatcatttggccaaggcctttgaatctctattcgggagtgtcacttgtttacctggttgttccactatgtatcgtctacgtaccgctgacaaaggcaaaccattgattatcgctgatgccatcattgacgagtacagtgagtgtgttgttgatactttacacaagaagaatcttctgtctcttggagaggatcgattcttgactacgttgatgaccaagcacttcccatacatgaagtacaagtttattccagatgcatacgctagtactgccgcacccgaaacctggagtgttcttctttctcagagaagacgttggatcaattccaccattcacaatctagctgagttggtccgacttcctgaactgtgtggattctgttgtttcagtatgagattcgtcgtcttcatcgatctgttcggtacaattattcttcctgcaactacagtctatctaggatatctgatctacaaagtcgcaacgcatcaaggtcaattccctctcatttcgatttgtatgattgctggtacatacggtttacaagctttgatatttattctcaaacgtcaatggcaacacattggatggatgattatttatatccttgcattcccaatttactctttcattttgccaatctactcattctggaatcaggataacttctcgtggggtaacacacgtattgtcctgggagaaaagggagctgcaaaggttgtggccgtggacggcgctgaatttgacccaagaagcattcctcttcagcgatgggacgattacgcctcacacaacaaccttccaggacgtcgtggagtaccagtcgaaaaggcatacgatacattcgatgatcaatacgaaatggatgacatgaaatccatgtactcatctgtcaagccagcctccactattttaactggtttccctggtcgcggtccatacatgcctcctcaatctacttactccgcaaaccaatacactgaccaccctgtccgcaatcattctgcaatgtcccttcgccaacaagatcgttccgcctcaccatatcaagactaccctggcaacaatcgtccttcgatgcaaatgatgtcttcggataatcttctcggtggtggtccaggacgacatcaatcacgctcgtcggtaggcttcacaggtggtgctcgttcaccattagcaggagctggtattgatagacctgctagtggatttgatttccaaaggggtaccgccggtccagatgatttgcagattgtagaggctattcaaaactgcttgagggaggtagatctagataatgttacgaagaaacaggttagagctttggtagagcagaggttgcagacagagttggttggtgagaggaggacatttttggacaggagtattgattctgagttggctgctatgtaa

SEQ ID NO: 312 - DNA, 259 bp, Botrytis cinerea
  source 1..259: mol_type = genomic DNA
catttcggaggcggtcgaaactcgccggtttcatgcgtgcctctcacttcttcagtgaagctcgaaggaaccacgcttgaccaagttaatatgttcaccctatgtctatttcaggatgtgttcagcaaagcttacaaatcgaatcctgatagtatgccgtactttttggttcctatcaattgtccaaatcacactggggactggaaagattatgagcccatgtcaataattgattgggaaactgttcaatatgtccaag

SEQ ID NO: 313 - DNA, 200 bp, Botrytis fragariae
  source 1..200: mol_type = genomic DNA
gcatggcaagaggcagaacataatcctggaattgttcgtacatctattatgagcctcgatgatttaaagattgagctctgccttccgatcgagccaccaccaattccgcccttgacacttcactggaattccagcacagagctgtctgtcgagtttacaaacgatgccgaaataggaaccaccgaggacatgatattacg

SEQ ID NO: 314 - DNA, 210 bp, Botrytis cinerea
  source 1..210: mol_type = genomic DNA
agaagcagattgttattttggccatctcaccatcatcgcagatggatatgcctccaaattccgcaagcaatacatcaacaaaactcccattgtcaaaagtaaattctacgctctagaattaatagattgtcccatgccagctcccaatcatggaatcgtagtcctctcggacgtctccccagttctcctctatcaaatcggtacccacga

SEQ ID NO: 315 - DNA, 254 bp, Botrytis cinerea
  source 1..254: mol_type = genomic DNA
gcgaagttgatggagcaaaagaagttcatgaaaattggcttgtctacagaagctttccgatcctacgtcccaatcatacaaatggaggtggaaaactttatgaagcgttcttcggcgttcaaaggtccaaagggaactgctgacattggtcccgctatggctgaaatcaccatctacactgcttcgcacactctgcaaggaaaggaagtccgcgatcgattcgatacctcctttgcctctctctaccacgacct

SEQ ID NO: 316 - DNA, 209 bp, Botrytis cinerea
  source 1..209: mol_type = genomic DNA
ttcaacgctgtcaactgggtagaatcatctgcatgggatggaagagacgccattgtcgttgctggagatattgctctatatgccaagggtgctgcacgtccaactggaggtgctggagctgttgccatgttgattggaccaaatgctccagttgttgtcgagcctggtcttcgcggatcctacatgcaacatgcctacgatttctacaa

SEQ ID NO: 317 - DNA, 186 bp, Botrytis cinerea
  source 1..186: mol_type = genomic DNA
gtctggctaagcctagtcaattgaatgcgttcattcgttatagttcacagcagactgaaagtcatgatacgttaacagagacaactcgaaatattggcatcatagctcatatcgatgcaggcaaaactacaactactgagcgtatgctctattacagtggctatactcgacgcataggagacgttg

SEQ ID NO: 318 - DNA, 1610 bp, Fusarium oxysporum
  source 1..1610: mol_type = genomic DNA
atgggttttaatccgcaaggccaaggcaacggcccaaactatgatgcgccacgggaaatgcaagatttaccagctggccaagcttaccactttcgcgaatctgacgaaacagccgccgctcgtgtttctcctgtgagcaatccttacgaaccagactatgatcaattgtcccctccccctccgctgggcgcacaacgacccgtgcccgagcagaatgagtcgagccgcgatcttctacacagttcataccaaggcagcgtaggccataacagctttgacggccatagttttggtcacaatagctatggacctggtgcttttgggcattatcctgctgaccagcacggtcgcatgcctgggtctccgggctacgaatacccagagcctgagtacgatgtcgaagcttcgcgtttggcagaatctcgtctctccgtcatgcatcgcgcccctacgatgcaagattggggtcagaatggcgaggctctgtctgttccagactttgcccacggacgccccgactcaacgtaccaggagttcgatgtcgacgagagctggatgatgcgacagcagcagaaccaactcgcaggtggtctcggtcgctcaaagacccgtaaagtcaagctcgttcagggctccgttctcagcatcgattaccccgtgcccagcgccatcaaaaacgccgttgaaccgcgataccgaagcggtcccggaagcatggaggaggagttcacaaagatgcgctacacagctgctacatgcgaccccaacgatttcaccctgcgaaacggctttaacctccgccccaagatgtacaaccgtcatacagaactgctcatcgccatcacctattacaacgaggacaaggtgctacttgcgcgtaccctccacggaacgatgcagaacattcgggacattgtgaacctcaaacgctccaagttctggaacaagggcggtcctgcgtggcagaagatcgtcgtttgtctcgtctttgatggtatcgacaaggtcgacaagaacgttttcgacgtgctcgcgacggttggtatctatcaagatggtgttctcaaaaaggatgtcaatggcaaagaaaccgtcgcccatattttcgagtacaccagccaagtctccgtgacacccgatcaacagctcgtccgtcccgatcccgacaagcctcatcgcaatctcccccccgtccagtttatcttctgtctcaagcagaagaacagcaagaagatcaattcgcatcgctggctcttcaatgcctttggccgcattcttaacccggaggtcgccatcctcattgatgccggaacgaagccggccccccgcgccctgctgtccctctgggagggcttctacaacgatcgtgatctcggcggcgcctgtggagagatccatgtcatgcttggcaagggtggaaagatgcttctcaatccactcgtcgcggtgcagaatttcgagtataagatctccaacgtcctcgataaaccgctcgaaagtgcctttggatatgttagtgttttgcctggtgctttctcggcgtatcgcttccgcgctatcatgggtagacctctggagcagtactttcacggcgaccatacgctctccaa

SEQ ID NO: 319 - DNA, 4677 bp, Fusarium graminearum
  source 1..4677: mol_type = genomic DNA
atggcgagacgaatgtccatgtattcgatggcctccgaggctatgggcggtcctcaagctccccagcagatgtctaccacgactctcctgaatgccatccacaacatctacctgtcttctcaaccttatcagatcgatgccggtactagtctggttgtcaacacatggctcacagctgctcaggctggtgctactgttgatgctaccctcgctgctcgagcctgggagcatgctaggcgtcgtgctgaagatggatgtgttgttttaggttcactccaccaggcaactccctcgcttctcgtgccgttcctgaacactttcccgttcgccattcccgcatccatttacaagtcattggaggctgtacaaccgtttctccgatgtgtcactccatacaacgcttcggcccctcgacagatcgcactcggcgttacactgacattgagtttgggaggaagtgtcacaggagcctctctggccttgtctcaaggtggaatcgatactgagaatggattgctcaacgttcctgccgaggctggataccgtgcttttgacgttttctactatttgctcacatccgcctcgacacccgcggagcgagagtttctaggcctcaaggcgccttcagcgtatgctctccttgctcgctcgggtacttacgagcctccttcttacctcatcaccgccgatgatggtgccgctgccgacgactttcgccaggcactcaaggagattggtatcaagggatctgtccaccgtaacttcatctctaccttggctggacttctcaagcttggcaacactctcgactacgatgccgattccgacgatttcgaggagatctgcgaagatgtcagcggtcttcttggtatggagcccgaggttctcatgcaacagttgagcactgaggatcgacgaacacttgttgctggcttgtatgaggctctcgttgactgggtcatttccaaggccaacgctgccattgccgctcagatgctccgtatccgagatggcgatgagtctgttgatggtcgtggcgtccgcactccaaacgaaaacgaggatggtgacaccgtttccatcactgttgttgaagtccccgaacccgctctcggcagggctttggccatgcgaaccattttcgacgacactttgggcattaacgctgagatgattgaggatggtgtcgagatccaccctgcttcatcttctgttgttcgggagatgcagcaggccgttgccgatgtcgcgcccgatctgggcattatgactggtccccagggccgagaccgccagcatgatattgagaagcgagaagtcattttagagaaggctgcctacgcttctgaggaagacagcttcctgaagaagttgttgttccctgttgagggtcaaggcatcaacttgggccgaactggtcgtttcgatctaccaggtctcctgagctctagccgtgcctggtttcatctcgctctgcatcccacagacgattctcctgctaacttggctacccttcctgctatcacctctgcgtggtcagctggtaccatttcccgacagctccgttcttggcgtcttcctgaatgggccaaccgtcgtaacagaagtctcgactacacagctgattttgatgtagacgagttcgttggtcgttacggcgcactaggctgtaaggatggcaaggacggtatcgagacttggatgctcgagagaggctggagcaacggcgaagtctttattggcaaggagcgaatctgggtccgcgagggtccttggtgggaggcagagagcatgctcgacatcaagcctgctcacagtcttcaaagcataggtcaaaatccgttcacatccggttttgacacaagctactcagccaacccacccaatggcagcggcttcttccctgctcccgctatggacaacagcatgaatggcagcaatgaccagctcatgcatacccgtaatttcagccagggcaacatgagccaagccactttcaaccaacaccctcacttgaaccctcaatcagcaccttcgattgccccatctgctatgcgcaatgctcagcccgctaccggtgactacggtctcggtaacaagggcgacacctacaagggacaggtattctataacgatgatggagacttcactggtaagcttgatggagaccttgccaaggacaagaagatcgaaaccaagcccctgacctttggccgacgagcttgggttgcttttgtttgggccttgactttctggattccttcacctcttctcaagtttgttggacgcatgcgacgacctgatgtccgtatggcttggcgtgaaaagctcgtcttgttcttcattatcctccttcttaacggcttgattatcttttggattatcggtttcggaaagcttttgtgtcccaacgccaacaaggcatggaacgttaaggaggttgctggccatgcagaagatgaggatgctttctgggttgctatttttggcaaggtttacgatatcaccgacttctggcgacaacagcacagtgataccagcattaagaccaccaagacgaacatgttgcccctcgctggtatggttatggataactacttcatgcctcccctgaacagagcttgcagaggcctcggcatcaaggagactgttcaactcaccttcaacgagactataacgaaccctcttgcacagcatgtttctggtttctacactcgcgaccgtaccagtgctcttcacaacgctgactggttctggacgactttccagcccaagatcaaggaatactaccatggtgatctcgtttggaaagaaggcaccgttaagagccagggctcaggtagcgagcagcatccatgggtcatgtacggtaatcagatctacgatcttacggattatctgcacaccctagatgtcaacgacaacttcgatacctacaagttcttgaacgaggacatggtcaacttatggaagaacagccccggtaccaacatcaagaaggatcttgaccttctcatttccaacgcaaagaatgagactgtggccgccaaccttaagaacagttggcagtgcattcaaaacattgcgtacaagggtatcgtcgatttccgtgactcaccccgctgccgtgtcaacaactggctccttttggccttcgccattatcatctgtatcgtcaccgctgtcaagttccttgctgctctacagtttggttccaagcgacgtccttcgccccaggataagtttgtcatctgccaggtgcccgtctacactgagggtgaagattctcttcgaaaggcattggactcgttgacggctcttcagtacgacaacaagcgcaaacttatctgtgtcatctgtgatggtgtcgtcgtcggtgaaggcaacgatcgtcctacacccaagattgttctcgacattctcggtgttgatcccaaggttgatcctcctgcgcttcccttcaagtctgttggcaacagtgccgagcagctcaactacggtaaagtttactctggtctgtacgagtttgagggcaacgttgttccatatatcgttgtcgtcaaggttggcaaggagtctgaacagaccaagtctaagcctggtaaccgtggaaaacgtgactctcagattctccttatgagcttcctgaaccgtgtccatcatcgcgctcccatgtctcctctcgagcttgagatgttccatcaggtcaacaacattattggtgtggaccccgaattgtacgagtaccttcttatgattgatgccgatacctgcgttgaggaagacgccttgaaccgtcttgttgccgcctgtgcccacgacgcaaagattgctggtatttgtggtgaaaccgccctggagaacgatgaaaagacttggtggacaatgatccaagtttacgagtacttcatttctcatcatcttgccaaggcctttgagtctctcttcggcagtctaactcgtcccagtttcaccatgtaccgtcttcgaagtgttgacaagggcaagcccctgattatctctgatggtgtcattaaggattacagtgtttgcgacgtcgacaccctccacaagaagaaccttctgtctcttggtgaggatcgttatctcaccaccctgatgaccaagtacttccccgagatgtcctacaagtttatccctgatgctcagtgtaagactgctgcccctgaatcttggagtgttttgttgtctcaacgtcgacgatggatcaactcgaccatccacaacctggttgaacttatgcaactcaaggagctctgtggtttctgctgtttcagtatgcgcttcgttgtgtttattgatcttaccggtaccatcattctcccttcaaccaccgtctacattggttacctcatctacgtcttggctaccggcactggacccattccgtacatttctcttgctatgattggtgccgtttacggtcatcaggctctcatctttattctcaagagacagtggcaacacatcggatggatgattatctacatccttgctttccctatctactccttcattcttcccctctactccttctggaaccaggacaacttctcgtggggtaacactcgtatcgtcattggagagaagggtgacaagcaggtcgttgctgttgacgatgagggcttcgatcctcagtttgctggcgaaaggtag

SEQ ID NO: 320 - DNA, 6546 bp, Fusarium graminearum
  source 1..6546: mol_type = genomic DNA
gaactcaaaccaccaaaaaccaaccctcgcctctcccctttgctactctttgcattacgcattgccgacactcgttttacggcttcgtcaaatcactccgtctcgcccttttttgcgaccgagactacacaagccggtgaatcactttctcgtgattgattcgtctttttgaacttgaatcgacgccaaattacatctttttcgttggcctttcggaccagagtcacctctccctaagccatttgacgtttttgacgacaacatcttgcagtgccggtcacgcttgttcttccgcctgatcttgaatcacatcacgctcgttgatcatccacatgtgtatctctagataatctaataactcaacatgtcgggatatccgggcggtggtcaacgcgaccactatgacgatggctacggccaccctcagggaggcaaccaacagcaaggtggaaacacggattcctactatcaagacgatcaatactatgatcaaggctatgacaaccgcggccacaataataataacccgaataacaacagcaacaacaacaacgagggctactatgacgaatctggttattacaacgccgaccctaacaacccttatcaacatgacggaggctactacgacggccacgaccagtatcaagatggctattatgacaatggccagggtggatactacgaccaggactatgatcgtgggcaccaaggacagggtgcccgtcaaggctctgaggaagattccgaaacgttcagcgacttcaccatgaggtcggacatggctcgcgctgccgagatggattactacggccgcggggatgaacgttacaacagctacaatgacgggcagcgtggttatcgacctccctcctcccaaatctcttacggtgggaatcgctcgtctggcgcatcaaccccgaactatggtatggactatggcaatgctctacctcctggccagcgttcccgggaaccttatcctgcctggacttccgatgcacagattccgttgtcgaaggaggagatcgaggacatctttcttgacctttgttccaaatttggtttccagcgagacagcatgcggaacgtgtacgaccatctgatgatccttctcgactcccgagcctctcgaatgacgcccaaccaggctcttttatcccttcacgctgactacattggcggcgataacgctaattaccgcaagtggtacttcgccgctcatcttgaccttgacgatgccgtcggatttgccaacggtcttggaaagggtaggaagaagaagggtagcaagaagaagaagaaagacccagaggccagtgaagccgagactttacaggatctcgaaggtgacgaaagcctcgaggctgctgagtatcgttggaagacacgcatgaacaagatgtcccagcatgatcgaatccgacaaattgctctgtaccttctctgctggggcgaagccaaccaggttcgcttcatgccagagtgcttgtgttttatcttcaagtgtgccgatgattatctcaattcccctgcatgccaggctctcgttgagccggttgaggagttcaccttccttaacaatgtcatcacccctctctaccaatacttgagagatcaaggttacgaaatctctgatggtgtatacgttcgacgtgagcgtgaccacaagaacatcattggctatgacgattgtaaccagcttttttggtaccctgagggaatcgatcgcatcgtcctgcacgacaagagcaagcttgtggatgtgccaccagccgagagatatgtgaagctcaaggacgtgaactggaagaagtgcttcttcaagacttaccgcgagtcccgttcctggttccatcttctggttaattttaaccgcatctggatcattcatttgaccatgttctggttctacacctctcacaatgccccaagtatcctggttggtccaaaatacgaacagcagcttaaccaacagccctcaacagccaagtcattctctatcgtagggttcggtggtgctattgcttctcttattcaggttcttgccactctcgccgaatgggcctatgtgcctcgtcgatgggccggtgcccagcatcttaccaagaagctctttttcctgttgtttatcctggtactcaacatcgctcctggtattaaggtcttctttcttgagggtattggtggaaagaagatcgacactgccattggtatcgtccatttcgttatcgcattgattacgttcttattcttttccgttatgccacttggaggcctttttggcagttaccttgctaccaacaacaggaagtatgttgccagccaaaccttcactgctagctggcccacgctccgtggtaacgatatggcaatgtcctatggactctgggctgtcgtctttggcgtcaagatgggtgtttcatacatctacttgattctgtccttccgtgaccccattagatatctaagcatcatgaaggtcaactcttgccagggagacgctcttctttttggaaatcagctatgcagatggcatccaacaattgttctggcactgatggcattcactgacgttatcttcttcttcctggatacatacctttggtacgtccttctcaacaccgtcttctcggttgcccgatcattctacatcggatcttccatcttgacaccttggagaaacgtcttttcccgtcttcccaagcgtgtgtactccaagatcctcgccaccaccgacatggagatcaaatacaaacccaaggttctcatttctcaagtttggaacgccatcgtcatctccatgtatcgggagcatctcctcgctatcgagcatgtccagaagctattgtaccaccaggttccttccgagcaggagggcaagcgaactctgagggccccgaccttcttcatctcgcaggaagatcattctttcaagaccgaatatttccctgcttacagtgaagccgagcgtcgaatctcattctttgcccaatctctgtccacacctatcccggagcctttgcctgtcgacaacatgcccacgttcactgtcatgattcctcactacggcgagaagattcttctgtctcttcgtgaaatcattcgagaagatgaaccatactcacgagttacacttttggaatacctgaagcagcttcatcctcatgagtgggattgctttgtcaaggataccaagattctggcagatgagacctctcaattcaatggagaaaacgacaaggacgagaagaacactgccaagagtaagatcgatgatttgcctttctactgcatcggttttaagtcttctgcgcccgagtacaccctgcgcacccgtatctgggcatctcttcgtttccagactctctatcgtactatctctggcttcatgaactacagccgtgccatcaagcttctgtaccgcgttgaaaaccccgaggttgtccaaatgtttggtggtaatactgataagcttgagcgagagcttgagcgtatggcccgtcgtaaattcaagattgtggtttccatgcagagattctccaagttcaagaaggaagagatggaaaacgccgaattcttgcttcgcgcttatcccgacctacagattgcttatcttgacgaagagcccccagttgcggagggcgaagaacctcgtctgtactccgttctcatcgatggtcactctgaggtcatggagaacggcatgcgacgtcccaagttccgtgttcagctctctggtaaccccattctcggtgacggcaagtctgacaaccagaaccactctatcatcttctaccgtggtgaatacattcagctcatcgatgccaaccaagacaactatctagaggagtgtctcaagatccgaagtgtcctcgctgagttcgaggagatgaagaccgacaatgtctccccttatacccctggtgtcaagaacaatgtctcctcgcctgtcgctattctgggtgcccgtgagtacattttctccgagaacattggtattctaggtgatattgctgctggaaaggaacagacattcggtacactattcgctcgaactatggcacagattggtggcaagcttcattatggtcatcccgatttcctcaacggtatctttatgacgactcgaggtggtgtttcaaaggctcagaagggtcttcacttgaacgaagatatttacgctggtatgaccgctctcctccgtggaggacgtatcaagcaatgtgaatacttccaatgtggaaagggtcgtgatttgggtttcggctccgttctcaactttacaaccaagattggtactggtatgggtgaacaatttctgtctcgcgagtactattaccttggcactcagcttcctctggatcgcttcttgtccttctactacgcccatcctggtttccacttgaacaacatgtttatcatgttctcggtacagatgttcatgattaccatggtcaacctgggagccctccgtcatgagactgtggcctgcgagtacaaccgaaacgttcccatcaccgatcctctctaccccagcgggtgtgccaacactgatgcgcttacggattggatttaccgatgtatcgtgtcgattcttttcgttctgttcctctctttcattccccttattgtccaggaactttctgaacgtggcatttggcgtgctttcattcgattgatgaaacagttttgctcgttgtcgctcatgttcgaagtcttcgtctgtcagatctacgcgaactctgtacagcagaacatttcgttcggtggtgcgcgatatattggtacaggtcgtggtttcgccacggcgcgcattccctttggtgtcttatactctcgattcgctggaccagctatttacttcggcgctcgtttgctcttgatgcttctgttcgcgaccctcactgtctggaagggtgtcttgatttacttctggattacccttcttgcgctgacaatttcgcccttcctgtacaatccccatcaattcgcttggaccgactttttcatcgattaccgagattaccttcgttggttgtcgcgtggtaattcccgcagccacgcttcatcttggatctcgtactgtcgtctttctcgaactcgtcttacaggttacaaacgcaagacacttggagacccgtctgccaaagcatcagctgatgtccctcgagcccctttcgcaaacatctttttcagtgagattttctcgccattgatgcttgctgttgtaacgattctgccgtatctttttgtcaacgctcaaaccggtgttactaagcagagcaatccaaacttcagaggcaagatccaaccgacgcaatcgctaatgcgtctactcatcatcgcttttgcgcctgttgccgtcaatgcaggtgtcttggctgctatgttcggcatggcttgctgtatgggacctctcctcagtatgtgttgcaagaagtttggcagtgttctcgcagctattgcccatgccacagctgtgatcttccttcttatttccttcctgggcatgttcattctggagagctttaacttcacccgcactgtagcgggtatgatcgccgtggtctcgattcagcgcttctttgtgaagcttattgtttcgacctgtctcactcgtgagttcaagggcgacgcgtctaacatcgccttctggagcggaaagtggtactcgatgggatggcacacaatctctcagcctgctcgtgagttcctttgcaagatcaccgaactttccatgttctctgccgatttcgttcttggccactggcttctcttctttatggcgcccgtcatcttggtccccaagattgatactcttcactctatgatgctgttttggcttcgtcccagtcgccaaattcgaccccctatatactcgatgaaacagtccaagcttagaagaagacgtgtcatccgctatgccatcctctacttcaccctcctggtcgtattcatcgctctcgttgctggacctgctgtagttggtaaactcatgggcgaatcactcagcaagaccatcgaaaagatggttcctatgcagggtcttgtgcagcccaactatcttcacaacaacaacactaacagcaccttggcaactggtatcaagaaccctagttacaccggcgctggtctcacaatgactggcagcaagcgcgtccaggcctcggctactggcaagatcaagctgttttgagcgaaaaaagactgggagacagggtctgtctttttggacatttctcggacacagtcgtcgctctctgttcctatgcacagaagaaagttatcaaaatatgaagtttttgctttttcgtttttgcttttgcttttcagttcagtacctagcacaggtggatgcgtatgtacacattttgcattttatttagaagcggaagggtggtgagaggtggaaaggaggtcagcaacacaagccagacctgacctgacctggcattcactggttgaactgaagtggtctttttttgttggcacaaggcgcacctttttaacttattctaatgtgtacaatgaaaggaagcaaca

SEQ ID NO: 321 - DNA, 3504 bp, Fusarium graminearum
  source 1..3504: mol_type = genomic DNA
atgaacgacgatgacgcgattcacaacatccacaagaagatagagcgggaaaaggccctcatcaacgctgccaattctatgagggcacagacaaacaatgaagccgttagatcccgtctcgactcccagatgcgcgatggccgccgcaacctccagtttttcgaggagaagcttagggatattcagctgcgccgtgtgaaccaaggtgttggagacatgtctctcgggggacctgctgacgatgccggtggccctcccgcaccacctcctaaggatgcctccagcaatcccgcgggagatagaggttcctacggctctggttcgggacagtacagccaggctggcggtggttccgacttaatgccccctcgtcatccttatgcaccgggacctggtggatcgggtattcctaaggcacgccccaactttaccaagttagacttaatcaaatatgatacgccacacctgggccctcgtattcaactcatgttgtcccagatccagttcaagctcaatgtcgaggagcagtacctgaagggtattgagaagatggttcagctttatagcatggaaggtgatcggaagagcaaagccgacgcagccgctaggaaggttgaaagcaagcagaagattctactgttgaagcaggcactcaagagatatgaagaactgcatatcgacgcggacgttgcggatgcacaagatggtaagttggcgttgaatgacgtcgaatgtgaagctgacaaagagttagatgattcaatcaacgcccccaacctcaggaagcccctcagtggacaactctcgattcgaatgatagcaatcaaagatgttgaccatgctgcgactggacggttcacgagaggtcccgagacctttattgccgtgaaggttgaggataccgtcatggctcgtacgaaagcgtccaggaacgatcgatgggaggctgagttccatactatcgaagtcgacaaggccaacgaaatcgagttgactgtctacgacaaacctggcgaacaccccatgcccataggcatgctctgggttcgcatttccgacattgttgaggaaattcgtcgcaagaggattgaggccgaaatgaacagctctggctgggtgtctgccgacagaatgggcagcaccagtgctgcccctacacagttcccgatgagtccttcttcaggctcttttggaccaggtgctcaatcgactggtggtgaccaaggggatgatactggcccattcggagctgctggtccccagcctcaggtgcaaactggacctatcgaggaatggttcaatctcgagccaactggacagatccaacttcagttgacatttaacaagtccaacaacaacagccgccctgccgaccttggtcttggtcgaaagggtgccgttcgtcaacgaaaggaagaagtccacgagatgtacggacacaagttcgtgcagcatcagttttacaatatcatgcgctgtgcgctttgcggagatttccttaagtactcagcaggcatgcagtgtgaggattgcaagtatacctgtcatacgaagtgttattctagcgtcgttacaaagtgcatcagtaagagtaacgctgagactgatcccgacgaggaaaagatcaaccaccgcattccgcacagattcaacccttattccaacatgacagcaaactggtgttgtcactgtggttacatcttgccttttggaaagaagaactgcagaaagtgctcagaatgtggtcttactgcccacgcccagtgtgttcatcttgtccccgatttctgcggcatgtcaatggccgtcgccaaccagattctggacggcataaggactcagaagcaaagacaagccaaggtttcttcactttcagaaaagacacttcgacatggcaagactagcccgacaagcaccagctcgccggctccctcatactccagcacgactgctccttcttaccagtcaggaccagtctccccggaggctacagaggccgctaagatgatgtactcgaacccttccacgccgagacctgccggccctgatcgaacttcatccagctcccaagctgcggctgcagcatctgcggctatgtctggaggacctggtgcggcccaacggcagaactcagactttgggcgatatagcggcggttacgatcaaccgcaagaagacccctatgctcaaggaggtcaatacggcgcgggccagcagcgtaagtacaacccggccgattatgcgaacgtgaaccctggctacggaggaccacagcctgctgctcaggctcagcgacctgtacagcagcagccagcccaacaacctcctcctcagtcaccgctacctccagtaccgcaacaccaacaacagcagccacaggctgcctaccaacagcccgcagtgccggcgcatagccctcagcaaccagaacccatgtctcctaagcagcagtcagcggctggtggtaagtctgctcccttggctactgaccctggaactggccagcgtatcggacttgatcatttcaacttcctggctgtgttgggcaagggtaacttcggtaaagttatgttggccgaaaccaagcgctctcgaaagctctatgccatcaaggttctcaagaaggagttcatcatcgagaatgatgaagtcgagagtatccgttctgagaagcgtgtgttcttggttgccaaccggggcagacacccattcttgaccaacttgcatgcatgcttccaaacagagacccgtgtgtacttcgtcatggagtacgttagtggtggtgatctgatgttgcacattcagcgaggtcagttcggtactaagcgtgcgcaattctacgccgccgaggtctgcctggcgctcaagtacttccacgagaacggtgttatttaccgtgatttgaagcttgacaacattcttctctcacttgatggtcatgtcaagattggtgattacggtttgtgtaaggaggatatgtggtatggctccacaacaggtaccttttgtggtactcccgaattcatggccccggagattctcctggacaagaagtacggccgtgctgtcgattggtgggcatttggtgtgctgatttaccaaatgcttctgcagcagtctcctttccgtggagaggatgaggacgagatttatgacgctattctcgccgatgagcccctgtaccccattcacatgcctcgagactcagtctcaatcctccagaaattgctcactcgtgagcctgaccagcgactcggaagcggcccgactgatgcccaggaggtgatgagccagccattcttccgaaacatcaactgggatgagatgtaccacaagagagtgccgccgcctttcatgccgcagatcaagagtgcgacagataccagcaacttcgactccgagttcacaagcgttactcccgttttgactccagttcaatccgttttgtcacaggccatgcaagaggagttccgaggcttctcatacacagctgattttgactaa

SEQ ID NO: 322 - DNA, 5592 bp, Fusarium oxysporum
  source 1..5592: mol_type = genomic DNA
atggctatgagcctcccacagctcggcggcgcaggaggccctcacactcaaccctctttgccatcgttgccagcacatcttcaatccgatacgcatctcactgctcatctcgccagtcgcttccatgtctcgcatcctaccgctcgactgtcttctcacgctctcatctctctcaacacctataccaactcctcaaagggtcccgatggcggcaaggaggggagcgccatggctggcgccgaggaaatcgctgacagagcttttctgcgattaggacacagatccgagaaccaagccgttgtgtttttgggtgaatctggcgctggaaagtctactattcgagcccacctcctgactgctcttctcaacaaatcatcgacgcctctgtccacaaagctctctctcgccgcatatgtctttgatagtctcacaactaccaagactgccacaacacccactgcttccaagtccggtctcttctacgagttgcagtacgatacttcagccacaacaaaccctgttctgattggtggtaagctcttggatcatcgtctggagcgtagccgtatcgccgatgttcccacaggagagcgtaacttccacgttctttactatcttcttgccggaacaagcgaggctgaaaaatctcatctcggcttggacggtggttctgccactggaaccactcaaaagcgatggaagtatcttggccatcctactcagctcaaggttggaatcaacgatgcagagggtttccaagttttcaagaatgctctgcgaaagctcgagtttcctcgcgccgaaattgccgagatatgccaaatcctcgccagtattcttcacattggtcaactagagtttgagacaactagccagaccagcgtcactggcgatgatagtggtggtttctctcacgagggtggtacaaccattactgctgtcaagaacaaggatgttctcagcatcatcgctgctttccttggtgtcagcgccgctgacctccagaccactttgggctacaagaccaagatgatccaccgagaacgtgttactgttatgctcgaccctaacggtgctcgtgctcacgccggagagcttgcccgaacactttactctcttcttgtggcttggattcttgagaccattaaccagcgactttgtgctcccgaggagtccattgccaacactgtctcgatcgtcgatttccccggtttctgccagcaaactcccactggctctgcgctcgatcaacttctcaacaatgctgctaccgagtgcatttacaaccttactctccagaacttcttcgaccgcaaggctgatatgctggagtctgaggaagtcagcgttgctgcgaccagctatttcgataactcggacgctgttcgaggcatcttgaagcccggcaacggtcttcttagcattctcgatgaccaaactcgacgaaaccgaacagatatgcaattccttgaggctcttcgaagacgtttcgatggcaaaaacgctgctatcgaggtcggctctgcccaagctaagcttcctggaagcaacttcatgactgagaacacatctgctgtcttcaccgtcaagcactttgctggtgaggttgattaccccgtcaagggtctcatcgaagagaacggcgagatcatctctggcgatctcctcaacatgattaacggcactaagagcgagtttgttgcccgccttttcggtcaagatgctctccagactgtcactcaccccaatgaacgcactaccgttatgcaggctaccgtcagctcaaagcctatgcgagcgcctagtgtcatgtctcgaaagacgcatcgaactggtcgtcctagcacagcttacaagcgccagcagcaagaggccatggaggagttagatcagcagagccaggctggagagtctaagaagaacgccaagatgactctcgagcaaggtgcttcaggccagttccttgcctccctggacaatgtccagaaggctgtcactgaccctggcaccaactcatacttcgtcttttgcttgaagcccaacgatcgacgaattgcgaaccagttcgacagcaagtgcgttcgtatgcaggtccaaactttcggtattgcagaaatcagccagcgtcttcgatctgctgatttcagtttgttcttgcctttcggcgagtttctgggtatgacagacccggagacaatcttggtcggcagtgaacgagagcgtgctgagatggtcattgaagagaagcagtggccccagaatgaagtcagagtcggtgccactggtgtcttccttagcgaacgctgctggatggagattgcccagcttggcgaggcagtgtcagtttctggtcgctacggcggcttgccttcatcagatgctggtgatggtctcacacctgctgagtctatggctttcggtgcctccaaggaacatttggtttctggtggcaacacccctctcatgtacggtgagaaggccaagggtggttacttcactgatgacactcgatccgaggctggtgtttctgcctttggtggcggtgacatgttcaagaacctcgacacacgcgagcagatggctgagcgaggcaatgagaagtctctcgaggaggttgaggagtatagagataagcctagccgcaagcgttgggtggctctcgtcttcttcctcacttggttcatccccgattttgccatcagactgatcggacgtatgcctcgaaaggatgtccgtatggcctggagagaaaaggtggcgatcaacatgctcatttggttgatgtgtgctgtcgccgccttcttcatggtcggattccctatgctcatttgccccaagcagtatgtctacagctccaacgaactctcttcctacgacggtgacaagggcagcaagggcgcctacgttgctatccgcggtttcgttattgacctcaatgccttcattcccaaccattatcctggcagcaacctcgtcagcgaggatactctcttgaactatgccaggcaaggatatcatgcgctcttttccccatccaagtgtctgcctctgtgccagggcaaagatggtcagatccctcctgaggttactctcgacaaccgaaacaccaacatcactggtcagccccagcttcttgcctccagagatattgatgtcaactctgtctaccacgatttccgttatttcaccaatgacagccgacctgattggtacttcgagcagatgtacaccttcaagcatgtctacctcaagggacgaatgggttacagccctaagtatgtcaagaagctggcccgagatagctcttggaacgttgtcactatccacgggaaggtttacgacatgaccaagtacctccagggtggtctccgtttgaaggccaaggctggcaagcctactcccaacatcccaggtgccacagacttcatggaggacagcgttgtccagctattccgaagtgcaaagggccaagacgtttccaagtactgggataacatcaagcttagccctgtcaaaaaacaacgcatggagacctgcctgaacaacctcttctacattggtgactcagatactcgaaactccacccgctgtcagttcgctacatacttcatcttggctatttcagtcatgctcgcatctatcctggtcttcaagttccttgctgcgctccaattcggtggcaagaacgtgcctgagaacctcgacaagttcgtcatgtgtatgattcccgcttataccgaagatgaagactcgttgcgtcgtgctatcgactcgctttctcgcatgaagtatgatgataagcgtaagcttctcgtcgttgtctgtgacggtatgattatcggtcagggtaacgacaggcctacgcctcgcatcgtgctggatattcttggtgtcccagagactgtcgatcccgagcctctcagctttgagtctctcggtgagggtatgaagcagcacaacatgggtaagatctactcgggtctttacgaagtccaaggccacatcgttcccttcatggtcattgtcaaggttggcaagccttctgaggtctctcgccccggtaaccgtggtaagcgagactcccagatggttctcatgcgtttcctcaaccgcgtccactacaaccttgccatgagtcccatggagcttgagatgtatcaccagatccgcaacattattggtgtcaacccaaccttctacgaatatctcttccaaattgatgccgatactgtcgtcgctgcggactcagctactcgaatgatttcagccttcatcgatgatactcgcctgattgcttgctgtggtgaaaccgctctcaccaacgccaagggctctttcatcactatgattcaggtctacgagtactggatttcacacaacttgtccaaggccttcgagagtttgttcggctcagtcacttgtttgcctggttgtttctctatgtaccgaattcgcgctgcggagactggtaagcctttgttcgtcagcaaggagatcgttgaagactactccacgattcgtgttgatactctgcacatgaagaacctgctccatcttggtgaggatcgatatctcacaaccttgctcctcaagtaccactccaagtacaagacgaagtacctcttcagcgcacaggcctggactattgcccctgactcttggtctgtcttcctgtctcagcgacgtcgctggatcaactctactgtgcacaatttggctgagcttattcccttggcccagctttgcggtttctgctgtttcagtatgcgttttgtcgtcttcatcgatcttctgagcactatcgtccagcctgtcattgtcatgtatattgtctacctgatttaccaggtcgctaccaacccttcagttgtgcccattacagctttcctgctgctcggtgccatctacggtctgcaggctgtcatcttcatcctccgacgcaagtgggagatggttggttggatgatcatgtacatcgctgccattcctgtcttctctttcggtctgcccctgtactccttctggcacatggatgacttcaactggggtaacactcgtgttattgctggtgaagccggtaagaagatcgctgtttcagatgagggcaagtttgatcccaactcgatccctcgcaagaagtgggaggagtaccaagccgagctctgggagacacagacccagacagcccgtgacgatgtgcgatcagagatctctggttacagttatgccaccaaggctcaaggacccttctctgagtacggtggtggttaccagcccagccgccccggctcaacagctggcttcggccaccagaacatgtctcgcatgtctctggcccattctgagatgcctggcaaccgtgcgagccagtttggtggctcacagttcttctctcccgaggacctggttggcatgcctagtgatgacgccctcctcgctgagattcgtgacatcctcaagacagctgacttgatgactgtcaccaagaagggcatcaagcaagagctggagaggcgattcaatgttcccctagacgcgaagagggcctacatcaactctgcaactgaagccctgctttctggccaattgtag

SEQ ID NO: 323 - DNA, 1992 bp, Fusarium oxysporum
  source 1..1992: mol_type = genomic DNA
atggatctatcacagcgggcgcttccgcgtcacactcatcaccaaccaccaccatctctctcaaatccttcgccctcacatctgccgcctcaacattctacgtctacgtatagtcctggtcccgttgcctcgcatccaactctccctcttcccggaactcacccaccatcctcggctttgacaccaggatcggcctcaacatcccctgcatccatctcccaccggttaccttcagcatcagcttcgacgacatcaaggcatcctactggcgattatctccctgacgcagatgatcaagacgcgtcgacacccgtggatggagaggaacctccaaagaagaagcaaaagcgcaacaagccaactctttcatgccatgaatgtgtagagcgcaagaccaagtgcgacagaggtcgaccccattgtcttgcctgcataaaacgacagactgaatgccgatatgcccatgtcgcaaaccttctcgaggagaccaccaggtcagccgccaatggccgccgtatgacgaaacccccaaagaagaagtctggctctagtggaaagtcccccattccaaatatcgcagataggggtatgtcgaatgatcccagggcaacctcgcgtggcgctgttgccctctctatcggccttctgtccaacgttccttattccttgccttctgcaagtaacgtttttggtatcgggtccgagcacccatttgccaactactggacctgcgaagggggcttgcctgaggttatctcggtgcttccagacaagattcaagccgatatactacttagccgatacttcgaatgtgttgaccccgtgtatcccatgatacatcgccagacattctatgcggactacgaacacttctggcagatgaatcagcaagaaaagaccgatacagatccgtccttcattgcattaatctttgtcatgctggccctgggaactcagtttgtaacatcgactacatccccacaggagcgaaggcagacagcagagttctatgcttcggctagcaaccaagctctccgtatcgcatcatatcttagcagtgcatcgttacggtcaatccaggctatggtattgctagtgtacttccttataaacgacaaccatgcctcagatgggtgggcgtttgcaggtattctgattcggcaagcttatgctatgggtcttcatagagatccaaatattgtgactccaaatgccaccctgtttgagaagcagcagcggcgtaaggtctggcaagcggtacttctccaagatactttcttgaccgtcttactctccctgccaccgtctgcgacacatacagatgtttccgtggaagacctactcgacgatggctcctcgattgcaaatagcgacccaacagatacggcatatattcgaggctcttggactttggccaacttggttcaggagacgatctgctcaccaagatcgttagacctaccaatctgcactacggcaaggcataagtctaagttgattgctgacttccgagctgtttaccgttcgttccctgacgtcttccggtcttgggatcctgatagtatcacggcgctcgcgaaaaccaataagagggtggttcgtcagaccctgttcctgacgagcaactacttccataacttgatgcttgttcatgcttccgagagccctgatgttcctgtcaatgttcgtggtacactggaggcagcgcacgacgccattacagctttcttccttcttttcacccttcttgagatagaagcacgtgtttggtgggtgttcaaccaccgagctttcttggaggcgctgtgtatcggaaatgtcctgaaggaggctgctcgagaaccaggtggtgcagatatgatggcaagagatcctctccttgtcagggcaaaagctgatatcacacgcatgatccaaatcatgcaggttatgggcgaagactctgaggtagcgaggactcgagtgcaggttttgagtgactttctggcatga

SEQ ID NO: 324 - DNA, 1581 bp, Fusarium oxysporum
  source 1..1581: mol_type = genomic DNA
atggctcatcatcaagcgcggacgatggctatggatccgccacatatcaccgaatttgcttctgagcgttacttcgaaaagttaagccagctcaatgcacaccaacatcagcgtcaacctcctccgactcgagataatcttgatgcttccacctcgtcgccttcgagatttattcttcctctacgagaaacgaaaactgccgatgttgaacctctaaggccccttgaccagaagcgtgataaatcaaggtttttcggccttcgctcaaaggtctcgatcctccactctaaatcgagtgtcgcgtctggtcatgcgcctcgagtttctgttgagacgccgcaaaaaagtgctagcttcgatcagcttttcctaggacttcccaacgaattacagattcaaatcatttctgccctcccactaaccgacgtcctgaacctccgacttgcctccaaatcgtggcatactctcgtcactttcaacgaaaatactatcgctcgatatcatctcgaacatcatattcccgtttacgcctcccgcctctaccccatcacagacccgagcgagatcaacttccaacatctatgcgggatatggcatcgattacacgtcgctgccaagctcgcctttctaatgtgtgaatggattacaaaagatatctttcttcgccaaactgaagctcaacgacttgcatttgcaccccagaacgagcgcatgcggcgacgcctaatacctcttctatttaccatattccacttcttcgagacgtaccgaaaattgtacctaaagcgtatggctgagaacggaggaaaaggattgagacgggaaccttatactttgaacccgattgaagccgaaatcatgagtatgtacgacgaccaaaccttattaagggttcacgaagtttttccccttgtaatatcatcgttctgtcggagactccgaccaccgacatatgttggtagagtcgagcgatcacttcgtggctatattcgggagaaaccgtccgacgacatgcatgttgccattttgtgcattggtggactgcgacaagtggaaaggctttgggaaatcaagggatacaacagcaggcgtggtgctgttgacacatggtttaatgctctcacgaaagaggcgccacctactgaacagtcaacgtcgaaaccgaaacgaggtcttttcggacgcaaaaagtccactagtgaagctcgatcgtctggtactgcattgaacaaggtccggagttctggctcaatagatgggaacatggattgggaagccaatcttgtcttcaacacgagtttatctgctggggctcccatgtcacctcttacttcgcaacaggctcaggcattactcagcgaccttcccgtactgcaacaaatatggctcacaacagctgaggccctgatccttcagcgtcgggttgtcgagcgtccacaggatatcaaacgcaaccaacaggtcatgctggatttgatcagtgaagatggacttgtagaagaggacgaatggtggtacggccgcagcattcccgattctgtgcggcctcccgtcggtgtcactgatgacgatgcggattaa

SEQ ID NO: 325 - DNA, 723 bp, Fusarium oxysporum
  source 1..723: mol_type = genomic DNA
atggcgtggacgtgcagcggagacactaactcggctcttattgggaacatgtggaagaatggtctcattgccgaccctcgagtgaaagaggcattcctcaaggttgaccgagctcactacgctccagccatgccatatgaagactcaccccagcccatcggctactcagcaactatatctgcaccgcatatgcacgcctcagccatcgagcatgttctcagctaccttcttccctcatcgacatcgccggccccccgggtcctcgatatcggttctggatctgggtatctaacccacgttatggctgaacttgtcggtgagaagggccttgtagtcggtcttgagcatattcgtcagctgaaagaacttggtgaaaagaacatgtcgaaaagtgaggagggaagaagattgcttgagagtggcaaggtgagatttaggtttggtgatgggaggaaggggtgggttgaggaaccgagagagggagagaagaatgaggggacgggctgggatgttattcatgtcggggcttctgcagtggagattcatccagagctattggagcaattgaaggcacctgggtgcatgttcatccccgtcgacgatgacaagatggggtacaaccagcacgtttggagaattgagaaggatggaaatggggagattacgaagaagaagttgtttggagtccgctacgtgccgttgactgaggcaccgaaggcgtag

SEQ ID NO: 326 - DNA, 2790 bp, Magnaporthe oryzae
  source 1..2790: mol_type = genomic DNA
atggcgtatagaggtgctggagggccgggaggcggccgtgactacgatggtcacaacatgcaagacctaaaccctcacagccagtattccaatgtccaattgcctcctgggcacgagcaagaggacgaggcacacaggtcccttttgacccaaggcacaacgctctacgaccacgaccgactcggcgcccacacgcctccagtgcgtccagtctcggcctacagtctcacagagtcctatgccccgaatgctcccaccaccgttcctggctcggccgtcggcgcatctccctcgccatttcagaatgactatggtgtttcgtcgggctaccagggcgcaatgggcggccacgcagacgacggcttccccattggcggcggagacccccagcaaggccacccctacgataccgaggacagctgggtgcagcgccagaaccccaacgccgctccccagggtggtggtctgaaacgttatgccaccaggaaggtcaagctggtgcagggttcagtcctgagcattgactacaacgttcccagtgccatcaggaacgccgtgcagcccaagtaccgcgagcaggagggcaccaacgaggagtttatcaagatgcgatacaccgcggccacctgtgaccccaacgacttcaccctgaagaacggttacgatttgcgtccccgcatgtataacaggcacacggagcttctgatcgccatcacctactacaacgaggacaaggtactgctgtcccgtaccctgcacggtgttatgcagaacattagggacatcgtgaacctgaagaagtcgactttctggaacaaaggcggcccggcttggcagaagattgttgtctgcttggttttcgacggtatcgagaagaccgacaagaacgttctggacgtcctcgccaccattggtatctaccaagatggcgtcgtcaagaaggacgttcacggccaggagactgttgctcatattttcgagtacaccactcagctgtccgtcaccccgagccagcagctcatccgaccccaggacgacggccccaacactctgccgcctgtccagttcatcttctgtctcaaggccaagaatagcaagaagatcaactctcaccgttggcttttcaacgcctttggacggatcctgaaccccgaggtctgtattctgctggatgccggtaccaagcccagctcgaggtcgcttctcggtctctgggagggtttttacaacgacaaggatcttggaggtgcttgcggtgaaattcatgctatgcttggaaagggcggccggaagctgctcaaccccctcgtagctgtgcagaacttcgagtacaagatctccaacattctcgacaagcctctggagagtgcgttcggatacgttagtgtgttgcccggtgctttctccgcataccgcttccgtgccatcatgggacgacccttggagcaatacttccacggtgaccacaccctgtccaagattctgggcaagaagggtatcgagggcatgaacattttcaagaagaacatgttcttggccgaagatcgtattctttgtttcgagcttgttgccaaggccggccagaaatggcacctgagctacatcaaagctgccaagggagagaccgatgttcctgagggtgctgccgagttcatcagccagcgtcgtcgttggttgaacggttcgtttgccgccaccttgtactcactgatgcacttcggaaggatgtacaagagtggtcataacatcatccgcatgttcttcttccacgtccagctcatctacaacatcctcaacgtcatcttcacctggttctctctggcatcttactggcttaccaccaccgtcatcatggatctcgtcggaaacccccaagttggacagaacgctcgcgaaggctggccttttggtaacaccgtcacgccactcttcaacgccgttctcaagtacatttacctggcctttgtcatcctacagtttattctggccttgggtaatagaccgaagggatccaagtacacctacgtcacgtcattctttgtcttctcggtcatccaggcgtatatcctggttttgtctggatacctcgtcgtccaggccttccagacacctatcggcgagcagatcaagaccgacacggccaaggatttcatggatagtatatttggaaagagcggagccgctggtgttattctactcgccttgatcgccatctacggtatttacttcatcgcctcgttcatgtacctggacccctggcacatgttccactccttcccttactacatgctgctcatgtccacctacatcaacattctcatggtgtacgccttcaacaactggcacgatgtttcttggggtaccaaaggatccgacagtaatgaagctctaccctcggccaatattaccaaaggcgagaaggacgaagtcgtcgtggaggaaatcgacaagcctcaagaggatatcgacagtcagttcgaagcaactgtccgtcgtgccctggcacctttcaacgacgaggagaagcccgagcccaaggatctcgaggactcgtacaagtctttccgtacaatgctggttgttctctggctcttctccaactgtctcttggctgttgcgattactagcgataatttcgacgctttgacaaagaaccaaaacacggccaggactgcctctttcttccagttcttgctgttctcgaccgctttcctctctttgatccgtttcatcggattcctctggttcttgggcaagaccggtataatgtgctgcattgcccgtcgctaa

SEQ ID NO: 327 - DNA, 5619 bp, Magnaporthe oryzae
  source 1..5619: mol_type = genomic DNA
atggcacaacaccttccgcctgtcggcggcaacggtggtgcacacacgcagccttcgctacccgcgctgcccgcccatcttcagtccgacacgcacctcacggggcatcttgccagccgattccacgtcagtctgccaaccgccaaactatcttcccacgccttcatctcgatcaacacatacacttcctcgagcaagggacaagatggaggcaaggccggaagcgctcaaggcgaagctgaggatatggccgacagggctttccttcgtctgggccaccgttccgagaaccaagcaattctgttcctaggtgaatctggctcgggaaagacgaccattcgatcgcacatcctgactgcccttctgaacaagacctccacgcccctttctacaaaggtctcactcgccgcatatgtcttcgacaccctaaccactactaagactgcgaccactccgactgcctccaaggcgggtctcttctacgaactccagtacgacacagcatcaacaacgagcccgctgctcatcggtggaaagctgctggatcatcgtctggagagaagtaggattaccgacgtgccaactggcgagcgaaacttccatatcctgtattacattttggccggcacaagtgccgctgaaaaaacccacctgggctttggagagcccgatgctggaaccggaagcaagcgatggaggtatcttgggcacccgacccaactgaaggtcggcatcaacgacgctcaggggttccagctcttcaagactgccctccgcaagcttgaattccctaggagtgaaattgcagagatatgccaagtcctggctagcattcttcacatcggacagctcgagtttgagagctcggaaaacacgacagttgccggcgatgagagcggtggcttctcgcatgagggtggccagatcacaaccgtggcaaagaacaaggacgtgcttgctatagtggccgcatttttgggtgtcagtgccgctgagcttcaaacaacccttggatacaagaccaagatcattcacaaggaaagggtcactgtgatgcttgaccctgctggtgcacgcgccaatgcaaatgaactagcccggactctttactccctccttgtggcctatgtcatcgagaacattaaccaaaagatctgcgctcccgaggaggccattgttaacacagtgtccatcattgacttcccgggattctcgcagcaaagctctactggctcatccctcgatttgctcctcaacaatgctgctgccgaggctatgtacaacttgaccttgcaaaactttttcgatcgcaaggctgatctcctagagaccgaggaagtcagcgtcccacccaccagctactttgacaactccgacgcagtcaagggactgctcaagaccggcaatggtctcttgagcattcttgacgaccaaaccaggcgtcaccgcaccgacatgcagctcctggaaagtctgcgcaagcgcttcgagggcaagaaccctgccatcggcgtcagtgcagccaccgcaaagctaccgggcagcaacttcttgtccgagaatactgctgcttccttcaccgttcgccacttcgctggtgaggttgaatattcgatcaaggggctcgtcgaggagaatggcgaagtcatctctggtgacctcttgaacctggtcaactctaccaagagtgactttattgctcgtctcttcggtcaagaggccctgcacactgttacccatccgcaggagagaaccacggtgatgcaagcttcagtcagttccaagcctatgcgtgccccaagtgtcatgtcgcgcaagatccgaccgggaacggctcgtactactcgccaacgcaaggagtcaatcagtgggcgacaggacaccctagacgatattgccagcgaagccggagattcccggcgccccgtcaacaagccatccgaggaaggcgcttctggtcagttcttacactcgcttgacaacgtgaccaagtctttccatgcacagaacacaaacgcctattttgtcttctgcttgaagccgaatgacaggcgcattgcgaaccagttcgacagcaagtgtgttcgcacacagatgcaaacatttggcattgccgagattagccaacgtatcagatctgcagacttcagtgtgttcttgccctttggagaattcctgggtcttgctgatgttgacactctcctcgtcggaagtgaacgggagaaggtcgaggctgttgttgatgagaagcgctggccgaccaatgagatccaaattggttccacaggtgttttcatcagtgaacgatgctggatggagatcgctcagctcagtgatatggtaaccggccgattcggcgtgcccgaatcggagggcggcacgccactcgccaacatgccctatggcgcttccaaggagcgcctcatagcggctgggaattcgccatacaacaatgacaaggccaagtcgggctactttggcagcaatgacatcgatggcaggtcagacgctggagtttcggcttttggcggaggcgacatgttcaagaatctggatacccgtgagcagatggctgagcgtggtaatgaaaagtccatggttgaggtggaggagttcaaagacagcccgagccgcaagcgctgggttttcattacctggatgctcacatttttcgttcccgagttcctgatacagcatctcggtaaaatgccccgcaaggatgtgcgtatggcatggagagagaagttggccatcaacttcatcatctggttcagttgcttggccgccgctttcatcctggtcgtgttccctatgcttgtttgccctacgcaatatgtgtttaccggcgaagagctctcggcctacaacggaaaagatggcaaggcttcgtatgcagccatccgtggtcaggtctttgatatcggatcgttcatccctaggcaccccctgccctatctgccatcaaagctcttcacccagtacgctggcactgatatcaccggtcttttccctgttcaggtgtctgctctgtgccaaggcacgactggctctgtcaaccctgccgtgctactggattacaaagacaccaacatcaccgactcgcccaacgtttttaacagccaggatctgaattcgcgctatcacgactttcgttacttcaccaacgatacaagacccgactggttctctcagatgatgattacgttccggggcacgtataagaagggcaacatcggctacccggctcaagttgtccagaagatggcccaacaaaggaacgccatcgcaatactcaatggtcgggtgtacgatttcaccaagtacatcgctggaggccgcgatttcagggtcaagtataacgaaacgcgtcctaccgaccagagtctactcgactttatggacccgtcagtcgtgaggcttttctcggaccgtagcggagaggacgtcacgccgctctgggatgcacttaggctggacccgactttacgaaagtcgatgcaactctgtctggataacctgttttaccttggcgatgtcgatacgcgtaactcggtgcgttgcaactttgccaaatacttcatcctggctgttacgatcatcctttgctccatcatcgccttcaagttcttggctgcgcttcagttcggtaccaagaacatgcccgagaacctggacaagttcatcatgtgccagattcctgcctacaccgaagacgaagagtcgctccgtcgcgccattgactctgcagcccgtatgcgctacgatgacaagcgcaaactcttgatcgtcgtttgtgacggtatgattattggtcagggtaacgacaggcccacgccgcgcattgtgctcgatattttgggtgtctcggagacggtcgatccagagcctctcagcttcgaatctctgggtgagggtctcaagcagcacaacatgggcaaggtttactcgggcttgtacgaggttcaaggtcacatcgtccccttcttggtggtcgtcaaggtcggcaagccatccgaggtgtcgcgccccggtaaccgtggcaagcgtgattctcaaatggttatcatgcgcttcctgaaccgtgtccactacaacttggccatgagcccgttggagctcgagatgtaccatcagatccgcaacattattggtgtgaacccgacattctacgaatacatgcttcagatcgatgccgacacggttgttgctgccgattcagcgactcgtttcgtctcagctttcctggatgacacccgcctgattgcatgctgtggagagacgtcgatcgccaacgccaaatcttcattcatcactatgattcaagtttacgagtactatatttcgcacaacttgtccaaggccttcgaatctctgttcggctccgttacttgtttgccaggttgtttctccatgtaccgtatccgcgccgccgagacgggtaagccgctcttcgtctcccgcgaggttgtcgatgcatacgccactatccgcgtcgacacgcttcacatgaagaacctgcttcaccttggtgaggatcgttacctgaccacgcttctgctcaaataccacaacaagtacaagaccaagtacatttaccgagcacatgcttggaccattgcccccgactcatggaaggtcttcctctcacaacgtcgtcgctggatcaactcgacggtgcacaacttgatcgagcttattcccatgggccaactttgcggtttctgctgtttctcgatgcgtttcatcgttttcatcgatttgctctctaccatcattcagcccgtcaccattgcctacattgtttacctcatcgtgcgcatggtcctcactcctgatctggtccccgttctggctttcgtgctgctcgcggcagtttacggccttcaagctatcatcttcatcctccgccgcaagtgggagatgattgcatggatgattctatacattatcgccatgccaattttctcgtttggtctgcccctgtatgccttctggcacatggacgatttcacatggggtaatactcgtgtcgttaccggagagaagggtaagaaggtcgttgtcactgacgagggcaagttcgatccctcatccatccctcgcaagaagtgggaggagtaccagagcgagctgtgggatgcccagacctccaaggatgacaccaggtctgaggcttccggcttctcgtacgccaccaaggcccccgtcgcggtctccgagtatggtttccccgtcaacccctatggcgcataccctcccagccgacctgggagcaccacgggcataccacacatgccacacatgccatactcggccagccgcatgtcattggcccattcggagatgctcatggcgggcaacagacaaagccagttcggtggatcacagttcaacctccctcaatctggcagcgaaatggaactttcaaacctggctggcttgccatcagatgatgccttgcttgccgagattcgggagatcctgagaacggcagatttgatgacggtcaccaagaagggtgtcaagcaagagctcgagcgcaggttcggtgtaaacctcgacagcaggagggcgtacatcaacagcgccaccgaagcactcttgtctggccagctgtag

SEQ ID NO: 328 - DNA, 2487 bp, Magnaporthe oryzae
  source 1..2487: mol_type = genomic DNA
atgggcaatccctttgaaggatggccggtacacgatatcgtttacacggtaatcgtcggcctggtcatgttggctgccgtcctggagtggttcctctgggtggcggccttcatgtattgtcttgttaaggtgtttataaaggcggagcattggacgattcgggctctcgcggttgtggttgccatccttttcgtcggattcagagcggtcttcttgccaatcatggtagtgacactgcccttaccaagcgctattgtgaaactctggccggaagacatggttgtgggactacagtggtttgccttctgggcgttcgccggtctcctgacgatcccatggcttttctgtgtctaccatttcgtcaccaaccagctaggccgagagaagcgtgtcaagcaggtgctggatgaggtctcggccccaaaggttgtcatcgtcatgccttgctacaaggaagacccagaggttttactcgtggccatgaactcaatcgtcgactgcgactacccgccatcttgtatccacgtgttcctgtcctttgacggagaccaagtggacgagctttatctcaacacaatcgaaacggtcggcgtgccgctcaccttggactcgtaccctaagagcatcgacgtcacttacaaggctgcccgtatcaccatctcccgcttcccccacggcggtaagcgtcactgccaaaaggcaacgttcaagctcatcgacaaggtctacaaggaatacctcgagcgcaacgacaatctcttcattctgttcatcgacagtgactgcattctggaccgtgtgtgcctccagaacttcatctacgacatggagctgagccctggaaactcgagggacatgttggccatgactggagtcattacttccacgaccaaaaagcacagtcttattaccgtccttcaagacttggaatacatccacggtcagcttttcgagcgtacggtcgagtctggatgtggtgctgtcacctgtctgcccggagctctcaccatgttgcgtttctctgcgttcaggaggatggccaagtactactttgctgacaaggccgagcagtgtgaggatctcttcgattttgccaagtgccatttaggcgaggaccgctggttgacgcacttgttcatgatcggtgccaagaagcgataccagatccaaatgtgtacctcagccttctgcaagaccgaagccgtgcagaccatgcagtctctggtcaagcagcgccgtcgttggttcttggggtttatcaccaacgaagtttgcatgttgactgactggcgtctatggacgcgttacccgctcttggtgttgatccgcttcatgcagaacaccattcgtaccaccgctcttctcttcttcatcatggttttggctatccttaccacctcgaagcgggtcagtgacctgcctgtcggtttcatcgccatctcgctcggtctcaattggctcatgatgatctactttggcgccaagctccgccgcttcaagatctggctgtaccccctgatgttcgtactcaatcccttcttcaactggtggtacatggtctacggtattttcacggccggtcagcgcacctggggtggacctcgtgccgacgccgccgccgccgacggagacaccaccgcccaacaggccatcgaggcggccgagaaggccggcgatgacctcaatatcgtgcccgagaccttcatcccggcggcgcagatcaagcgcaaggagagcggcaggcggcgcatcgtggccggtggcaacatccagccctcggccaagatcgacggcatgtttgccatccccgagcgtggcgccaacggttggtaccagcacgacaacatctcgctattcacggttgcccacggccacactggccgcgttcctctgcaccctcgtgactcattcgacagtttcttgtctgcgcagacggccctgaactcggtctacatcccgcgccgtgtcgagagtataatgggtgacgaggatcggcgcaagtacgagctcgcccaggccagccagtttaaccagttcctctccaaccagcgccgctcgaccaacggcgagccgccgcagggccaggtgtacgagtatagtgacgtcgacctgcaaaaggccgggtacactgacaacccgctgccgcccacgcctggagagactgcctctgctgttcctgccgccctcaatctgcaccacaaggttggcagcaccgacagcctcgttagtcttgggtcttcagcgtccaacagcaaccaacgggaccgcggaaggcagcgcaccctgatgccaccaacctcctcacaggcccggaccggtaggagtccactcggccgggcgagcttcttgcgcacgtcgacgattgaggacattgagctggagattggcacaagccatggaagcagcgcaaacagacctgcactgagcaggcaagcgtcgaacaacgaccccaacaacagcaacagcggcggccatcagcaacggtag

SEQ ID NO: 329 - DNA, 1158 bp, Phytophthora infestans
  source 1..1158: mol_type = genomic DNA
atggctccgactgtccaaacgtgtgatcctgtactggtgtgcgaccctgtcctcctgtgtgaccgaagtgactccgtgctggcgagcgaccctgttccgccacagaatctctcgttcgtgctcgaaaaggggggagcagtcaagtttgaagatcgtcccgtgcctgaaattaaggacccacatgacgtgatcttgaacgtacgctacacgggaatctgtggtagtgatgtgcactactgcacgcacggctgtatcggcaagtacgtggtggataagcccatggtgctaggccacgagtctgctggcgtcgtccatgccgtgggatccgccgtcaagtctctcaaggtaggtgacgaagtggccatggagccgggtgtgccgtgccgccgttgcgtccgctgtctcgagggaaactacaacttgtgtccggatatggcgttcgcagccacgccgccgtacgacggcacactggccaagttctaccgcatgccggaggacttctgctacaagctgccgtccaccgtcagtatgcaagagggagcgatgctcgaacccacagccgtggccgttcacttctgccgtctggccaaggtgtccccgggtcagaaagtcgtcgtgtttggtgtcggtcccgtgggtctgttgacctgcaaagtggctcgttacgtgttcggagccacaacagtcgtcggcgtggacgtcaatgagaaacgtcttgcggtcgccaaggaacacggcgcgacgcacgtgtatcaggggaagtccggcgtgacaccacaggagtcggccgagcagatcattgccgagtgcggactgggcgacggggccgacgtcgtgattgacgcgagtggagcggagccctgcattcagacggcaatctacgtcgcacgcagcggtggcacgttcacgcagggaggtatgggcaagacagacatcacgttccccattggcatcatgtgcggcaaggagctccgcgtgaccggcagcttccggtactctgcaggcgactaccaactggcgctcgatatggttgcaagtgggcagctgaacgtcaagggtctcatctcgaagattgtgccgttcgaggaagccaaggaggctttcgacaatgtccagcgcggtaacggcatcaagtggctcattgaaggacccaagtga

SEQ ID NO: 330 - DNA, 3907 bp, Fusarium graminearum
  source 1..3907: mol_type = genomic DNA
gatcttcgcttggccttgctccactaagaaggagtttcactagcggcccgcgatagctagcctgatcctagtctttacctcctcaacagtaacaccttctttcaccaccacaagctgagtcttgctcctttgttggaaacagtgaccggattcacacctgacctctggcaatcaataatttttgacccaagtcaggaacttatggctctgtgacagcaaacaagcgctgctgttgctgatttgctttggctgccattcactgacattgattgactggtggcaactaccaacaaacaccttctctcacataaatatacctactacctatctaattcctctccaatttcttccccgtcaactctctttctgcgcatcagcacacggatatcaactaagaatatgagcgacatttatcaacactctttcttgaagttttaaaacacaatatctttacttctttcgctatcaaacacatccttacatacattgacatcctctttggcccattctttgagtacccagacattatctcatcatggcggacagaggtgatcgaggcggccgtggaggccgtggccgtggcggacgcggcggcggctatcaagatggtcgaggaggcggacgaggtggcggagatgggagaggacgaggtgatggtggtttccgtggcggcagaggacgaggtgagggaggacgtggtgacttccgaggcggcttcagtggtcctagaggcggccgtggaggttctgatcgcgggagaggaggatacaggggaggccgaggtggagggcaattctcaaacgagccgtctttcttcaagatcgaatccggtgttcctcagcccgatgctgctattaccaagctcgaggatgaggtggtaaagaatcaaaataattctgttgcccagcttacatcgaaaatgtccaagttgggagtagaagaaaaggagcatttgagcaaattccctccacgacctgcatttggaaacaaaggccgtccagtcactttatgggcaaactattaccagatcgacaccaatattcccatgcttttcaaatacacaatttctgtcaaagagatcgtagctgaatcagaagaaaagaccgacaagcccactgtcgcccagcctaaggggaaagggaaaggaaaaggcaagcccggaaagcctaagaagtccggttctgtcgaagtcaagggacgtaaacttttcttggtcatcaaagagactctaaacgagctcaccaagaaggacaagagcctgcttcttgcgaccgagttcaagtctcagcttatctccttgcgcaagcttgaccttggacttgacaactcatttcgagtaaacctcccgtcatcagcaaaccccgacaagaccgaagtctttgaagtgaccttaaatggccctgaagtagcccgagttgacgagatgctcaagtacgtcaaatcgaataccagtgcttcacatgacgccccaggcaaacttgccgacgacgacgacgatgcagcaaaagccctggcattcccaaaattccctgatgttgttgatgccctgaatgtcatctttgggtttggcccgaggtcgaacgaagacattagtgctgtcggaaactcccgattcttctctttcaagaacggtggtatctgcagggatatgagcatgcgtgggagacccttacaagctgttcgtgggacattccagtctgtccgcctaggtaccggccgacttcttttaaacacaaacatcactgttggcattttcaagatatccggtaactgtgccaagctcttccaggatctcaatgtctttgaagcacagaagtcggaatggcggaaagtgaataacgcgaagttgatgaacaaatttctcccaaaaacccgcgtactggcaacgatgaagtttgccaatgacaagaaagtccaacgacggaaagcaatttacagtctggcctatgcacctgagattgaacgagcctgtcgtggcaacgatcatcctccccggttcacgaagggttatgaataccctggaccaggcaacgtgagcttctacatggtgtctgattctaaagggaccggtgaatatatcactgtcagagaattctacaagcggaaatacaacgacactacgctcaaagactaccctcttcttaatctcggcactgccgcaaacccgaactttaccccagcggagtatgtcgagatcctaccgggacagtcagtcaaggcgaagttgaatagccaagaatcgaccgcgatggtcgattttgcctgtcggtcaccttacgccaatgctttatccattacgaaagatgcgcgggaaactctaggtcttgacgacgagaaattggtgtacaagcccggcaaaagcatacaaaaatggacctatgtcaatgtcaaaccaggaggcaggtctgggccggttccaaagcgcactgtgatggaatttgctcaggtcatgagacaaatgaatattggaatcagcagcaaccctgtagacccttgcacagaggtcatcacccaagaagattacgctcaaggacgttcagatgctttcttcaaatgggcgaagcagaatcgcatagagtttatacttgtgattcttggtacatcagagtccgaaacatacggcaggatcaagacattgggcgactgcacctatggtattcacacctgctgcgcccaggccgaaaagtttggattcaacagaaaccctctgccatatttcgccaactgtgctctcaaatggaacctgaaggcaggtggtgtaaaccacaagctccacaacgagttcggtctcattaaagagggcaaaacgatgttggtaggatatgacgtcacccacccaaccaacatgccttcaggccagggtgatgatgctcccagtttggtcggattggtggccaccattgaccgagatatgggacaatggccagcctactcttgggaacagtcgtccaaacaggagatgttggacgagactttgactgaagcattcaagtcacgacttgcactttggcaaatgcacaaccgacagcagctgcctgagaacatcgttatattccgtgatggcgtgtcggagggccagtttgcccaagttttacaaagagagctaccacgcattcgcattgcctgcaatgccaagtaccccaagaacaagccaccaagaatttctctgatcgtttccgtcaagcgacatcagactcgcttttatcctacttcttccgagagcatgacgtccaagaacaatatcgaaaacggtaccatcgtcgatcgtggtgtcacgcaggctcgatactgggacttctttcttactgcacactccagcatcaaaggcacggctcgccctgcgcactacactgtgttgctggacgaggtcttccgagcgaagtacggagccgaggcagccaatgaattggagagatatgcccacgagctctgctacttgtttggccgagccaccaaggctgtgagcatttgccccccggcatactatgcagacgttgtgtgcactcgagcgagatgttacagacctgagttcttcgaaatcagtgacgttgaaagtgtctcaacagctgggccgggcttaggtgccagtgacccaaagcaggtccatgcggacctcgccaactcgatgtactatatctaagtgtgccgtgtgtgggagatgagttcgctcttttgggctacaaacagagacgagaaatgaagcttttttttttggggggggggttttttttgggaaattggtaggtttctgttaaaggtatgaggtagcgggatatctttgattgtctttcgtttggtttatatcgttttgtcctcatctttgacttaggacagaatagttaggatagcggaaacagcttgcagtcttgtatttggtacttgaagttgcaaggttatacatagcaat

SEQ ID NO: 331 - DNA, 2955 bp, Fusarium graminearum
  source 1..2955: mol_type = genomic DNA
atgtctgatagagggcgctcaccctctccagggggtccctcagggcctgggaggcgaccttcacagtccccagcccgatcggcaactggctctggtagtggacctgctggcggctatgcaaagcccctgggctacgatcctgcgaagcctccaaagcaggaggaccagggaaacacacgaatggaactacctccagatgcgtacatttccgagaccaaaaaggatatgtttactttaagaaacaatcgtttcaacactgagggaaagcctgagcacatcgaggtcaaccagtaccgaatgaccaagttcgacttcaacaagaagatctaccagtacgatgttgtactttcgcctagccctgacaagatcggtccggtcatgaagaagatttgggctcatcctgttaccgtgaagaccatgaagccctacaagcttgagatgtggcttttcgacggtaagaaactggcatggagccccgcgcttgtcgaccgtggtgaacttcggttcagtgtcgatctagacgaaggccaacgtcctcctggagccaagcctcgggatggtggcaagttcctagtcactattcgaaagaccaccgagatccaagttgctgctctgcagggctatctgtctcacaagatgtccttcaataacagtgttcaagaggcactgaacttcattgatcaccttgttcgacagttcccctccaggaacctacttgctatcaagcgaaacttttaccaaactggtcgacctggagctcctcttcaagacggagccatcgttgaggtccacaagggaacctacgcttcaatccgaatgagtgacaacttgaagcaaggtggtgtcggacttggctacaacattgatgtcgccaacacctgtttctggattggcaaccagccattggacaggatggcctgcaactttcttgctaccattgacccaagcaagttccgaggacacactcctgcgactctcaatgagatcctgaagccagtcaggaataggagtggcgggtgggagtcatctgatggcttcaagcaacttcgcaagttgcgacgcctcaaattcaagatcaagcacaagggccgcccaaacgaggacaagctgtacacgatcatggactttgcattcgatgccaagtttggtgaagctggtcacacctcccgcacccacacctttgagaaggatggaaaggacatcagcgtctatgactactacaagaaaatgtacaatgtcaccctgcgactttcccaccttcctcttatcaacgctggaaagggtggcttcattcccatggagcttgccttcgttgagagcatgcaacgatacccattcaagctcaaccccgaccagacagctgcgatgatcaagatcgcggtcacccgccctgccgtacgcaaagccgacatccaaaagggagctgccgctcttcagatcggtcaagatccttatctgagggagtatggtgtcaatttcgaagcccagtttgcgaagaccgaggctcgtatcttgcctccccctactgtcaggtttggccagggcacagcggaacccaagttcgctggtcgctgggacttgcgaggaaagaagttcttcaagcagaacaccgcccccctccagaactggggctttgttgcctgtgaagcacctgtcccacaggctgttctttcagcattcgccacaacattcaagaccactttccttggtcatggcggcaaggtgactggagaccccatgcttctcaatgcacctagcaacctgcgttttgaacccggaaagctggttgagtgggctcatgaggagatcactcgccgaaaaggctacacacaactcttgttcattgtcgtgtccaagaagaacagtggtacctacgagcgcctcaagaagtctgctgattgcagatacggcattctcagccaggttgtccttggtagccatgtgcagaagaacaatggccaataccactccaacgtttgcatgaaggtgaacgccaagcttggtggtgccactgcctgcacgcctcctctgtggaagactcccacattcttccccgacagccgcccaaccatcattgtaggttgcgatgtctcccacgctgctcccggtggtgcgactgcttcagttgcttccatgaccatgtctgtggaccccaatgccactcgatacgccgcagtcgctcagacaaatggatatcgcgtcgagatgcttacccccagcaacattcgactcatgtttgcagaacttcttcctcagtggcgacacaaccacccaggaaagatacctgctcatctgatctacatgcgagatggagttagtgaaggccagttcgctcatgtattggagcaggaggtatccgaaatcaagaaattctttggaggcagcctcccccccgacaagattcccaagatgacagtcatcatcgctacgaagcgtcaccatgtacgcttctttccacagaggggtgacaagaacggaaatcccttgcccggtactctggttgagaaggaagttacccaccctttcatgtttgacttctacctcaactcccatgttgctatccagggaactgcacgccccgtgcactactcagtgattctggatgagatggctatgccagtgaatgatctgcagaagatgatttaccagcagtgctattcctacgcccgctcaaccacccccgtctcccttcacccggcggtctactacgcgcatctcgctagcaaccgagctcgtgcacacgagaacgtcgcaaccagtgatggatttagaaccggtgccaaggggcatgagattattcgggagaagcaagcccatggcatcacctcggacgctcctaacaggaccgctgatgcaccccccctgatccgtctaggaggcccttgtggacagactcctgctgatggcgagaagcgccaacgagattttttccgcagtaccatgtggtacatctaa

SEQ ID NO: 332 - DNA, 1494 bp, Fusarium graminearum
  source 1..1494: mol_type = genomic DNA
atgtcggacctacaaagccgcttggagaagctgcaggagcttttgggcaacggcgtgaagcttgctgaaacgccacacgaagacaacacaacagatggttccgctgcaaatggccttgggaatagcttcggaatggtgatggatgatgagtacatccggaacgaggagcggcttgcagctagagagcaggcctcccaggaacagctgcgagccgatgctgatgccgccagacaaggcctgctcaaaggtaataaggaaaaagccttcgacaacgctgcttttcgcatcggccagcccgttcacaaggactttgctttctgtccgtttaaggtcgtcgtgtcgtatcccgaacgtttcatcggcaaggccaacaagcctcgtgtgaagccatttttcactgaaattctcaagggccgaacttgggactttttctatcttcatgacccgattgagccagccagagacccgtacctcttgattccatccgcccagttcgaggttttcctcgaagaaatcaatctcaaactgaacactttcctcagaatccctgtttgtcccatgaacaaggacaagttctacatgaagtttggtgaaggcggcacccctcgtcctcgttacttgagacgatctttggatgcgacctctcttgacatccggccgtggcctgcagtcgaccccgaagacgtcagatccttcgaagctgcctcggcaccgcaaaagctcacctggaggtccaagatgcgaatcgttaagtccggcttcgcaccaaagaggacggcagatccagacaaggctgcgaagaagaagcgtcacagggaccaaatgctgcgcaacacattgggctacttgggtcttgcgggagatccggatggccacgacatcgttttcatctgtgtcgacgttgaagccattgaacgtaagccaaaccctatctctgaagttgggatttctatcctggacacacgggacatcaaaggcgttcaccctaaggatgctggtcgtggttggtggcctatgatcaagactcatcatcttcgagtgcatgagtatgccagtttacgaaactaccaatttgtcaaggggtgccctgactcttttgactttgggaatagcgtattcccttacaaggacgagcttcaagaagtcatcatgagcatctttaacccctatatttcctctcaacgggaacttgtcgtcgttgggcatgatgtgcgacaagacatcacctacttcaacgatataggtatagatctccgagcccttgcaggactgagagagcctatcgacacccagggcatgcaccaagcttggtgcagctcaaccaatggacgaggcctcgtcaccgtactcaacgatctgaacattccaaacaagaatctgcacaacgccggaaatgatgcccactacacgctctgcgccatgctaggaattgcggtggtagaggtcaatgggaacgagcaacagagcaacgaaatgcttaacaaggttgactga

SEQ ID NO: 333 - DNA, 4488 bp, Fusarium graminearum
  source 1..4488: mol_type = genomic DNA
atggacaccgactcgaccgacagcgaagatgatcgcgttcagtatcgcctgaccgtgaggccttcgaagcatcgaaagaatacagagaagaagcgcctgaacaagcaggttttgaaacaatacatgatagaacacgacagagaagcctatgccaaagattctgagaaaaagaagcgcggccccttcgctgaagcttccaccgacattacaccgcgagaatatcagatagaactcttcgaagccgccaaggagaagaatctcattgtggttttacctacaggcacaggttctggtaaaacactcatctccatcttattgctaaaatactacattcgaatcgaagtggaatctcgcgctcttggaaatccgaggaaggtggcctttttcttggtggaaaaagtagccctctgtgagcagcaataccgatttcttaaggaccagattttcggccacaacattgtcatgttcacaggcgataaccgcggcgtgaccaaggacaagaagtactgggatgatcagttttcctcaaacaaggttgtggtctgcactgctcacattttgctcgactgtctgaacaacggcttcattacaatggaccagatcaacctcctcatcttcgacgaagcccatcatgcaaagaagaagcatgattacgcgcaaattgtccgacgatattattattctaccgaaaagaacaagagacctcgcattctaggaatgaccgcttcccctgtggattccaaggctggagatgttgcagaactggcacttgaacttgagaaaacccttgacagcgagatcgcaacactctccgacaagatgatgcgacaggcgactgatttccaagttcatgttgaagagacagtcaaatacaacacacttggactaccagacgagaccaagacacagctttgggactcgatctctaagctagtatcgcgaaacaaggaattcaaggcgtctctcgacttcacaaaagaggcctccacaatcctaggaccctggtgtgcggaccgatactggcaagtcttgatcgacgatacagagatcaagcgactcgccgacaggactcgcatggcttttttcgggggtggagagaagttgttggcaagaggagaccaagcagaagaggctgtcagggaggttcaaaaggtcgtcgcagcccacgagtttagggcgatcagtcctcaatcgcaggaattgtcagctaaagtgaaatgtctacatgaaatcctggttcatgccttcacagtcgataacacaaagcgctgcatcgtttttgttgatcagagacacacagcttgcctcctttcggacctttacgaccaagtttcaatggcaattcccggtatgaatgcttcgtatatgattggtcaacaatctagcagcagcacccttggcaatatgtctctgcgaaagcaatgttcaacgctcaagaactttagggacggcgtgataaactgtctctttgcaacatcagtggcagaggagggaattgacattccgagttgtgatcttgttatccgatttgatctctatacttctgttattcagtatgttcaatccaaagggcgtgcgagacacgaatcttcacggtatatcaccatgctggaagacggcaacatgagacagattcgcagtctgaaacaagcagcgagagatgcaacagcccttcgagagttctgtctaagaatacctgccgatcgaaaacttcaagacgatgtatttgatgaggagacggaaagtcagatcaagcaaatacgttttaacgtgtacaaaatagaatcaacgggcgcacaacttacattcccctcaagcctcgagatactagctcgattcgttgcatccttgggtacagcagagagcagccatagcaaggctgaatatcacgtctacaaggtgggaacatatttcacagccgccgtcaatctaccgtccagttcccccatcgtctcccaaacaggctatccacaacgaagcaagcttctcgcaaaatgctcagcggcttttgaggtttgcaagaagctcatcaatggcaaacacattgatgatcatcttcagcctactttcaagaaacatttccacaaaatgcgcaatgctcgtgtgggaataagccctaacaagaagggtgagcatgacatgcgcctgaggcccaacgtttggagtatccgtggagaatggacacacttcttcccaacaagaattactcttgacagggattgtggagagaaaaacaggtcgttgattcttctttcgcgaagtccacttccaggactaccttcaatccctctattcttcggcaatggacgctcagccatcgttgaagtgacatgttctcaagaacctttacccatcacgaccgaggaagctgggggtttgactgctttcacactcaaaatctttgccgacgttttcagtaaagagtttgaggccacttgcgaccagtttccttaccttcttgcccccttggcaaaagacaccaatctaaacgaaatatcgcgaatcgactgggatactgtcaaccttgtcagagaccatgacagtctcgaatgggagaatgcgcccgacgatttctttttcgacaagcttgttgtagatccatatgatggagggcgcaagcttataatcaaaggcattgacaaatccaagaagccttctgatcctacaccggagggagtgcctgagtcgagaagtcgtgcttataggtctgcggaacaaaacattaagcagtacagcaacagtctgttttccaagtctcgactaacggcccagtggcgagacgatcaaccggttgtcaaagctgagcttctctcattgcgacgcaatctgttggacgagtttcaagtaaacgaggaaatcaacaaggattgcttcgtcattttagaacccctcaacgtgtcacctctgccaattgacgtcgtttccatggcactcaagttcccggcaatcatccacagaatcgattctgctctgatcgctcttgatgcatgcgaactattcgacctctctattccgccagcgctggcactcgaggcaatgaccaaagacagcgacaacactgaggatcatggcaagcaacaaatcaatttccaagctggcatgggttccaactatgaaaggttggaatttcttggagactcgtttctcaaaatggccaccacaatctccatttttgtactcaaacccaagagcaacgaatgtttgtaccatgtagagcgcatgctgctcatctgcaacaacaatctgttcaacacggccgtagattgcaagctcccagagtacatacgatccttggcattcgacaggcgaacttggtaccctgatcttacactcagaaaaggcaaagctttcaaggcaacagcgcgacagcgcttagccgacaaaagtattgcggatgtctgtgaagctctcattggtgctgcatacctctcaagcaaggatgacaatttgaacatggccgtcaaagctgtgtcacagatgtgcaaagcaaagtaccataccatgatggcttacgatgagtactacgcatctttcaaggttccagattggcagaaagccagtccaaacgccaaccagcgtagacttgtgcagaaagtggcagacgctaccgggtaccacttcaagtctgcgccgctgctccagagtgcattcacacacccttcttacgcgtattcagggaacgttccaaactatcaacgcctcgagtttctaggcgatgccctcatcgacatgaccatcgtcgaatatctctatcgcaactttcccctcgcagaccctcagtggttgacggagcacaagatggcaatggcctcgaaccaatttctcggttgtctgtgtgttaagctcaatctgcaccaccatcttctgttcaacacgtcgcagttcatcagcaaaattcgtgactatgtggccgaacttgagttggctgaagagactgcgcgccaagaggcagaagaagacgggactccaatgcgcatggacttttggctcaatgcgacaacgcctccaaaagcgtacgcagattcaatcgaggctcttatgggggccatgtttgtggattctgaattcgactattctgttgttgaggatttctttaccaagttcatcttcccgtactttaaagacatgtctctgtacgatacctttgcaaacaagcatccttacacatttctcaccaagaagatgcaacaggagatcgggtgcatgaaattctgtatgatttcagacacccgcgttcctgatgcagagcgtggcatggaagttatgaaagagtacgacatatattcagcctttcaagtgcacgaaagagtcatcacatgtcacgtatcaaagagtggaaggtacggtaagattgctgctgcaaagggggcactcgagttgttggagccgtatggcggtgatgtggtcgcgatgaagaagctgttgggctgcgactgcgactctgtaacagcagccatggcggagatggaccatggaacagctgtctaa

SEQ ID NO: 334 - DNA, 4356 bp, Fusarium graminearum
  source 1..4356: mol_type = genomic DNA
atgtcctcaagcgataaggtcatggcggacgcctcttccataccagactccgaggtcaaaacaatagcgtcgtcctcggtcgtcgagatctctgctacaggcgagaaggagataacgactcatatacctgtcgcagatacaccaatgtgctcagatgaccaggccaatgtgcaagagcaagacgaagaagttaagcctcagaaagtgacgcccaatccagaggtggtaaatccccgcggttaccagcgagagatgctggaacaaagcatcaaaaggaatgtcatcgttgcaatggacacgggaagtggtaaaactcaagtggccgtgatgcgcatccaacatgaactcgatacatgtgcaccagacaagattatctggttcttaggcaagacagtatcgctatgtgaacagcaatacagcgttgtccaaaggcaaatgccgtcggtatcgatgaaactgctaacggggcaattgaacatcgatgcatggtccgaggacgtctggccccgtatccttaatgggactcgtatcattgtctcgacctttgatatcctgcgagatgctttggaccatgcatttgtcaagatgaacatgctgtcccttatcgtcttcgatgaagttcataattgtgtaaagaatagctctggtcgaaaggttatggtgaatttctatcacgaacacaagaacgccggcatgcccgtgcctgctatcctgggtttaacagccagcccgatacagtcgaagtcaatccacgacgaaatccttgagctcgaggtcaccatggatgctgtatgcatcactccaacaattaaccggaaagaactcctccagcacgtcaacaagcccaatctttcccgagtattgtatgatgtggaagagcatccgactcgaacccccctaatgcagactctgcagtctgagtactcggcgatggacatcacccaggacccaagtattataaaggccaagcaacttatcgctaagggcgagaagactggacctgaaatactaagtatgttgatgaaacacaggaccttctctcagaagcagttaaagtccttatggaacaaaagcaaagacattcttgatgaactcgggccttgggctgctgacaagtacatctccgagttggtcagtctgtttctcaagagaatcgactcgccaatgacgtttaacgagtcctggagcaatgaggataggacctacctcgcaggtcatttgagacagatcgctgccagtccccatcagcccaaactaccagacagacacaacttggccgacaagacgaataaactaatccaggaactacttgcagcggatgaagatgtggtcggcattatattcgtcagatcaagggctgctgccaacgtcctttgtgctcttttgagggagcaccccgagattcgacagcgatatcgagtcggctctgtagtaggatccgcagccaccaagattcgaaagcaaaacatctacgagtatctgcccggcgcgactgccgatacattacgcgatttcaaaacaggcgccatcaaccttttggtctcgactagtgttcttgaagagggtattgatgtcgcagtgtgcaacctcgtcatatgtttcgatgagacaacgacactcaagtcccatatccaacgccgcggacgagctcgcaaacaaaaatcaaagatgatagtacttgctagatcttcatccgacgctcgggaatgggattccctagaaagagacatgaagagtcgttatgagcaggaaaggggagagttggacgctttagagatagaggctcgcactgaagcgacgtcctctttttcttatactgtgaaaaactcaggggctagattggacctcgagaattctcgccagcatctggaacatttttgtaacaaggttttccagcgagattacgttgatccgagacccgtctacattttccacaagaccgaactgggatcagcaccgccgactttcagcgcaacggtgactcttccctcgggtctgcctaagcacctccgaaggtgccaaggtggaggtggatggagatcagaaaagaatgcgatgaaggaagcggcttttcgtgcattcgtcatgctgcaccaagaaggtttggttagcgaccaccttcttcccctaaatgcagattcgaaagaagcagaagaagaggtgcagctaactgcgcccgagcttctatttgacccatggaaagacattgcacagcggtgggagaccacggctgagaaatggctctatgcttacgagttcgccgatcacgagtatgttactcctcttcatttcgagattgccttgcctgtgtgtcttccacgaccccgcgacatcacctttcatcctgaagagggacttaaatggcatgtcaaatgcacctcaatcaagaggatctccaatgatgaatgcttgggcttgccagatcatacgtcaaccctattggcgatgcattatggccaccgctggaacgtggaagatcgtgaccatgtgatcaaattcatatatgagaacaagaatctcacccgagatcaaattggatcggtacccttcggcgaaagcattgatgctctattggaaaagagagtcctggttcgggaccccaaaaatactcccttccactacgtcaaaatgatcccatcaaagcctccaaaagagcaagttcagcacccatttaatgaatacgaggaagcgccagaagaacagtatctagttgtggatcaatggacacgcaggtcggacctgttgcatgagataaaacccggtcaggggaagagctcttgcaccaaaccctaccgctgggttctcccgatttccagagcgactgttgatgaggttcctcggcgtgccgctaagtgcggtatgcttatcccttccatcattcacgaattggaggttcagctcatcgcgaatgaactgtcctcgacacttttggcgccagttggtatcacagatctgcaattggtgattgaagccatcagctcgcgtagcgctgcagagcctgttgactatgaacgtattgaatttttgggcgattcggttttgaagtattgcactgttattcaagcctactctgaacatcccttttggcccgaaggtctactcaaccatttcaaagaccgactagtctccaatacccgtttgactcgcatgtgccttgagacaggcctttccaagttcattttttccaaaacatttactggaatcaagtggagaccgctatatcgagacgaattcctagataagaagccagtcgatggtgtatcaaggtttgttggtccaaagactcttgctgatgtggtcgaggcacttgttggagcctcctaccaggatggaggaatcagcaaagctctggagtgcatcaaggttttcttgggcaccaagtgcaattggcatgatgacaaagtcgccagagacatactcttccgagcagcaattagcgacgtaccgttgccccccacgatggagcctttggaagagctcatcgggtacacatttcagaagaagtctctactcattgaggcaatgactcacgggtcgtatgcggctgatgggcagcagcgatcttatgaacaactcgagtttcttggagatgcggttcttgactacattgtcgtaacccgaatgttccaatctgaccccccagtgcccaatggacgcttacacatggtcaagactgccatggccaacgctgatttccttgcttttacaaacatgcaacatggactacgccggcctgaagttgaaataaatgagaacggcgaaccagtgcctacagaagtttcactgccgatatggaaattcatgcgtcatagctctccagagatgggtagaatcatgaatgagacccaggcccgatttgagagccttcaagaggaaatcaatgaggctaggacgaatggtaaacactacccctggacacttctcgctcgtcttcacccgaagaagttctactccgatattttcgaggctaccctaggtgccatttgggttgattcaggagatatcgaagtatgcacagcctttcttcacaagttcggcgtcttgccgtatcttgaccgaattctcagcgataatattcatgttcaacatcctaaagaggaactcgccaaactagcaatcgaccagaaaatgacgtatgattatacggctgttgatgggcctataaaggagtacctctgcacggccaaggttggagatcgcgtcgtgggagtcgtgtcaggggcactcaataaggctgaggcaatgaccaaggctgccgaagagggcgtgaattttttgaatggggagcagaaacgtgcagagaaggcggctcaggatgaaatggcgcgatttcttgttgccatggaactcatttag

SEQ ID NO: 335 - DNA, 156 bp, Verticillium nonalfalfae
  source 1..156: mol_type = genomic DNA
tcatgaccacagtcatgagttctcaccgaatgaagacccagggtcactgatcgactggagccatctgctgtcgaccaaagaggttgagtacttgccttgggatgaagatcacagtcccagcttctatcaaagcaagtttgtgattgatccatacac

SEQ ID NO: 336 - DNA, 156 bp, Verticillium nonalfalfae
  source 1..156: mol_type = genomic DNA
agaaggtcaacgatctactgccacaggcgacaaacaagaagccatatgctagggtttatccggcaccgtgggcgaaagtcgacacgattccattagatcatgcttactttggggcgttgatccctttcatttcacacattgtcgaggttcgactgg

SEQ ID NO: 337 - DNA, 2877 bp, Verticillium nonalfalfae
  source 1..2877: mol_type = genomic DNA
atgcccggcatcgctcgcaaggtcgtcatttgcgcggcgatcgacggcctcatcgtacagcctctgtcctccaaagggcagcgccctgcgcagcccgtccgcattggatatggtgacggtgccatttccccagcgccgcgggatcaactccctgatctcaccaagcccaacgcctcgttcgaggcttttggtgttgtgggcctgattaccctttcaaaactgaatttcctcattacaattacccgtcgacaccaggtcgctcaaattctaggatttcctatctacgttgtcaccgaggttgcgattacaccatgcgcctctcgccaggaagccgaggatgccgttcttcggacctccgtgcagctgcagacccgtactgatgatacggacacagaggattcggacagcgatagtaccatcgagttaatggcccacgctgtcgatgaggtcgacgatcagacgcagtcagagggctccatctcagcaggcgttaagagcaccgtcgccgaagacgtcatgagtcgtaaggggggctatggtcgattcgcccagcgctggttcagcagctccggctggatgcagggccagaaacgcaacgctggctggagctacacgacgaccgagttgcctcgagcttcgatggaccagcgcccggacctggagcccccggcggcatcgaaggtgcctctggaagaagaggacgacagagtcaacgaagcaaaggcgtcttctctgcttcccaaattgctccgaactgcgcaaattctttacgggtcatctaggagcttcttcttctcgtacgacgtagacataaccaggcactgggcgactcgagcacaatctccatctggtgagctgccactataccgtcgcgtcgaacctacattcttctggaaccgaaatacttctcagccattcattgattccggaaacgatgcgctagttctcccactcatgcagggattcgtcgggcagagggagtttaccatggataagagcccaccgcagcatgacgaagacgcgaataacgcactggaaatgtcaaacatgtctgctccaacatctccgccagggtcgccccctacagaagcgattcgcggctccctggatctccggggctcggaaaagaagttcctgattacggtgatttctcggcggtccattaagagagccggcctccgatatttgcgccgcggtattgatgaggatggccatgtggccaacgctgttgagacggagcaaattctgtctaactcttcgtgggatcagagctctaaaatttactcgttcctgcaaattcgcggcagtatacccctattcttcacccagagcccgtactcattgaaacctgcaccagtcatacaacactccacagaggcaaactttgaagcctctaagaagcacttcgagcgccttcaccgagaatatggtatgctgcaagtggtcagcttggtggaaaaacacaatgttgaggctacaatcggcaacgaataccagcatactgtcgcgaagctaaacgaaaccgtcttcagcgatcatacttctcaagtcccgttcgaatggtttgatttccacgcagcctgtcgtgggatgaagttcgaaaacgtcagcctccttctggatgccatgaggaccaagcttgatgagcttgggagcactgtcgaaaaggatggagagctgttccttcgccaacgtggagtgcttcggacaaattgcatggactgtctcgaccggacaaatgtttgccagagctcatttgcaaagtatatgctggaatcacagctcaaggctgagggatacgatctgagcatgcaagtagaccagcaatctgcatggttcaacacgctgtgggcggacaacggagactccgtgtcgaagcagtacgcttctacggcagccatgaaaggcgactacacacggtacaagactcggaactacagaggaatgctcaatgatcttggcttctcattgacaagattttataacggcatggttaatgactatttcagtcaagctgccattgacttcctccttggcaacgtcacttccatggtctttcaagagttcgaagctgaaatgatgacgaaagatcccgccatgtcgatgctcaagatgcgtgaatcagctatcgaattatgccagaaacgcgtcatctcagaccaaaaagaggactttgttggcggatgggtcatgctgagccctccaacgtctgacgttgtcaagtcacagacacccttcgaagaagtgattctccttctcacagatgctgccctttatctctgtcgctttgactggaagcttgacaaggtatcgtcgttcgaacgcgtcgacctcgcgcatatcgtgggtatccgcttcggcacttatattacatccacagtttcgcctggtcacaccgacgagagtaaaaacattgggttcgtggtgtcataccagcctggaaagactgacatccaacgcacaaatactcgtacgctttcgagcaactttatcaaacaacctggtcaggtcgaagaagagtcattggccgcggtggcggtcgacgagcctgcggcgctctcggggctgatgggactgctgtccggtcatcgacccaaaccccaaacaccgactcgaaagctcgccttcaaggcgccgtattcgcagtcgtcggccgcggtgacgggtgaggggccacgcttgagcgagacacagcaggttgtgagtatctgtgctgatgtcgagagactggccttcaaagcgcagcctggaaaggacgtgcctggaaccaagagcatcatcgagaggggtgacatcatctcattggaggacgcacaagcaaacacgacgattttagaccagctgagccactctatcaagaggcttgtttgggcgtag

SEQ ID NO: 338 - DNA, 4014 bp, Verticillium dahliae
  source 1..4014: mol_type = genomic DNA
atgtcagatctagcagtcggtcagatcgtccagctgaccgacggccgcaatggcgtcgtacgcttcgccggcaccacccatttcgcctcgggcgaatgggtcggcattgaattggaggatgactctggaaagaacgacggcagcgtccagggcgagcgctactttgactgttccatggggcgaggcatgtttgtgcggccgtcgaccctgaccattctcgcccaggctccagctccagctgcggcgccggccgccagacctaccgtcaggaagacgagcaggcccagcagcttcgtgcccggcacgggcagggtgtcgagcgtcaccgacccgagcatggccaagcggatgagtctgaatgctgctagtcccagcccggccccgcgcacatctcgacctgcgagccttgtacggtctcctacgaagtcgccaacgaagcaaattggttcgaccacctccagcaccgcaccctcccggaccggcacaccttcaaacgccaaaggcaccaccgccacgcgaactcgcccggcagtaggtgttcgcacctccatgggaccccctccgattccctccgcacgagtgagccgacagccatcaacatcgtcagcgacaggtcgccctcccgccaggccgctttccaatcgactctccctgtccggctcgcgcagcgtgcccaagccagaccccctccgacgcccatcgaccgattcgcaagcaggcagggagcccggctcggcagcagacagcggcgacgacggcaggagcagctcgccatctaagggagcggctgatctggcctcaccgcatgccacgagcccggtgcaagctcggaccaacgcgctcgagcggttgacctcgggcaggacggcgaccacgacggcacggtcgccagccacggcgtcgcctcgaacggccggcggcaacacggctgcggcgcgggagaacgaagacctcaaggcgaagctccgtgtcatggagcgcaagaggctggaagaccgggagaagctgaagcagctggagaagctccaaggcgaacgcgacaagtttgagtcgatcatccagaagctgcagacaaagtaccaaccccagcaaacggagaatgcagagctccgcaagcagatcaaggaggccgagacgcggttcgaggccgtggagcagatgcaggccgagcatgagacggccttggagctggccacgctggaccgtgagatggcggaagagacggccgaagtgctcaaggccgagctcgaagcgttgaagcagaaatcagaggagcttgagctcgaggtggaaatcttgcgagaggagaacgaggagtttagccagggcatgacgcccgaagagcggtcaagcacgggctggctgcagatggagaggacgaacgagcggttgagggaagcactgatacgattgcgcgacctgacccaggctcaagaggccgagcttcgagaccagatcaaggccctggagtctgacctgcaagactacagtaccgtgcaggagcagttcgcggcctccaaggaaaagctggcacagtctgaaagcgcggtcgaggatcttcgccaacagctcgacaatgctcttggagcggaggacatgattgaggacctcaccgagcgcaacatgagcatggccgaagagattgaggagctcaaggccgtcatcgaggatctcgaaaacctcaaggagatcaatgatgagctcgagattaatcacgtacaaaacgagaaggagatgcaggaggaactcgacttcaaggacagcgtcattgcggaacaggcccgacgagccggtcagcaagaggaagccctcgaagacatggagtacaccctttcgaggttcagggaactcgtcacgagcctgcagggcgaccttgaggacatgcgcgcatcgcacgctgtcaccgaggccgagtcggagcaattagacagcaagtcccgcgccatgatggacctcaacatgaagctccagatctcggctgccaagacacaggtcaagacgatcgacctggagcttcgccgtctggaggcgcaagaagcggagcagcacctcgaaatcgtcaagctcttcttgcccgagacctaccaggaggaccgcgactccgtgttggcgctccttcgcttcaagcgactggcgttcaaggccactctgctccagggcttcctcaaggaacgcgtcacgggccagccgcaccccggccacgaggacgacatgtttgccggctgcgatgccattgacaagctcacctgggtggcggccatgtgcggccgcttcatcaacgccatcagccactgctcgatcgagcagttccagcactaccagggcgctctgtttgagctggagccggtggagcgggcggtgaacgggtggatcgacggcctcaggagggatgaactcaaggaggccaagtgcgccagcgagctgcagcgctccattgcgctcatgacccatctcgccgaggttcaccttacggacgatctgcagagcttcgccgacgccatgcacatgcgcgctctcgtcgtgcaaagccatctggattcggccgccgcggccattacgaccgccagggccatggtccagagagtcatccccgagtctggcgaggacgacgagatggcacagcacttcagcaagaaggccgagcacgttgtcggccagacccgcagcaccaaggtcattgccagcaaggccgtgcgcgccctcgaggatctcaagaaccgatctctctcgctggctcgggacgacagcacgcaagaggcgtttgagcagtgcgaagaggccgcaaaggacctcgccgcactggcgcggcagattggcctcgacttgcacaagctgctgcacgaggagggcaggaccgagccatacacgcacacggaggtgcagaacacgatggcgcagacggccctgtcggccggttcgtcgaccgactcggatctcttctcgacctacgtgaccaagctccgggtcgtcacgcagcagatcacggaccttgcgggcctcagctctgacctgacgcagacgcaagagtttgagctcaacccggccccctggaagctccgctctcaagaactcaaggctctcaagacgatccccgtggatgccgaagaggagctccgccgcgtcaaggaggagcacaacgaggcgcgccgcacgattgcgcagcgcgacgagagcctcagcacggcgacgctcaagattgagacgctcgagtcccgcatgcgcgacgcgcaccaaaaggcgtcgcgcatcgccgaccttgaggcccagatcgagacggccaagcagcgcgcggcggcgctcaaggaggacattgaaaagggcgaccgcgagctcaaggcgctcgaggcggaccgcgaccagtggaagaagattgcgggcgacagcaaggcgttcgccggcgccaacgacgctggcgccgccaagtcgggccaggaacgggccgtggcgacggcgcgcgagatggacgccctcaaggccgacattgcgcacctgcaggcggcggtgcggtacctgcgcgaggacaaccggcgggcgcggctcacggagcaggccgactacgactggctcgcggcgccgctgcgcaaggcggcgtcgccggccgagcagcggcgcgcgctcgtcgtggccgagggccgcgacgcgctcggcgagctcgtgcggttcgcgacccaggccaaggtgtacgacctccaggacctgccgcaggacaagctcgcgtggcggccggccaagagcacgccgcagtaccacgccgcgcggcaggcggaggacctcgcggcctggaagggctggcgcgactcggtggtgcagaagacggaggtcgtcgccgggcgcaggggcggtggtgctccggacatgaagagggtcgaggcgctgcggcggagcgcggcggctgcgcgactgcagattcggctgccggggcccgacggcaagatggcgcggggcagcggacgggatgtgcagattgtcggatcgagggagtgggagggtctgcaggggcggttggccgtgtaa

SEQ ID NO: 339 - DNA, 1089 bp, Rhizoctonia solani
  source 1..1089: mol_type = genomic DNA
atgcgctccactgctactactttctcccttctctctttggctcctgccctgtttgcatccccagttgagcgttgtacaggtaccatatcatctttagatgatgttgccaatgcaatcaaatgtactactatcaatatcaactcgttcacagtacccgctggaaagactttccaactggatgcccccagtggcgctacagtcaacctattgggagacgttacgtttggcgtctctgcatgggcgggaccactattccaattgaccggaacaagcatcactttcaacggcaatggacataccttcaacggccaaggcgaacaatactgggacggtcttggaagcagtggaacgactaagcctcaccccatgatgaaaatcaaatcgtccggaacgttctcgaacgttgtagttaaaaactccccacagcaatgctttagcttcggcaacagcgcagctctgactgtttccaaggtcacagtcgacaattctgcaggagatgctgcgaacagcaagagtggtggtaaagctgctggtcataacacggacgggtttgatgtctcggtttccaatctcactatcgaagactccaccgtgcacaatcaagatgattgtctcgcaattaataaaggctccaacattattttccagcgtaacacatgcaccggtggacatgggatctcggtgggctctatcgactcggatgtcacagtcagtggcgtacagatccttaataatgtggtcacgaacaacgacaatggtcttcgcatcaagaccaaggctgctgccactggctccactgtatctggcattacctacaccggcaacaccgtcactggttgcaaaaagtacggtgtcatcattgaccagagttacccagatacccttggtactcctgggactggcgtcaaaatttctggcgtgaccttcagtggtaccaacaccgtttccgtcgttagtggagccaaggaggtcgaagtcaactgcggctcaggttcttgcacaggaacttggaattggtcgggtctcaaggtttctggtggatccgcgggggccatcaattactctggtatcaccggtttctcgctttaa

SEQ ID NO: 340 - DNA, 169 bp, Botrytis cinerea
  source 1..169: mol_type = genomic DNA
ttcgttccaggagttacacgcaaagatcacttcactggtggaccagcaaaaagatagtaaacatatcgggaaaatatcgatatatattctccgaattctacgagatatcagagcagaattacctagtaaccctgcactacaaaagtttggactctcacttgtctcatca

SEQ ID NO: 341 - DNA, 179 bp, Botrytis cinerea
  source 1..179: mol_type = genomic DNA
ttcgtgctctcgtcgaaagcaaagacaataaagaagaacaaatggagcgcgagttggagggattgcgaagaggaagtgttagcaatcctactacgcatcgtactagtgccatgagcagcggaactgtgactcaggataggaattctctccaagacaataagagcacagttgtaagctgg

SEQ ID NO: 342 - DNA, 168 bp, Botrytis cinerea
  source 1..168: mol_type = genomic DNA
acgttgttcaaagtgcagtggcaaagcgagcacttgaaatgcagttaaagaatgagggactagatgtcactctacaaattgatcaaactcaacaatggttcaatactttgtgggccgacaatggtgacgccatttctaagcaatacgcttctacagcagcattgaagg

SEQ ID NO: 343 - DNA, 259 bp, Sclerotinia sclerotiorum; identical to SEQ ID NO: 312
  source 1..259: mol_type = genomic DNA

SEQ ID NO: 344 - DNA, 200 bp, Sclerotinia sclerotiorum; identical to SEQ ID NO: 313
  source 1..200: mol_type = genomic DNA

SEQ ID NO: 345 - DNA, 230 bp, Sclerotinia sclerotiorum
  source 1..230: mol_type = genomic DNA
gcattggctgcgctgaagacgaaacctttattgaaagatgaaagtattcgagatttggagggattgagattagatgtatgtgagcggtggtttggtgatgaaattctttactttacaccttatgttcgacacgatgatttggaaggatcattagccgttgagacattaagaggttgggcgaagaaagcatcagaggtactactggaaggattcacaaagactcttcaagg

SEQ ID NO: 346 - DNA, 196 bp, Sclerotinia sclerotiorum
  source 1..196: mol_type = genomic DNA
tcaatgccagagattgacggttactcttcagcagcggaggatttctgtgaattgtgcgaggcatcaggtcatgatgttctacattgccccatgttcggtcctaatggtaatagtggcaactctagagaggagtctcctaaagagcaacgaacaggaaaagacgttgtcatggaaggactcaaactatcacccaaac

SEQ ID NO: 347 - DNA, 194 bp, Sclerotinia sclerotiorum
  source 1..194: mol_type = genomic DNA
gcttacatttccaagcaggaaatcaatggccgcttgactgaaataatcattaacaataccgctgtaaaatctagagatagaaagtcccatgtctgtcaaagcacccttgtaatcacgctttctagtacgagtgaagtctcccttcagggctgctgtagaggcatattgcttagagatagcatcgccattatcag

SEQ ID NO: 348 - DNA, 753 bp, Fusarium oxysporum
  source 1..753: mol_type = genomic DNA
atggagacggatatgcaccgagtcatccgcacccaggacctttctgacgaccactgccagtacttcatctaccagaccctccgcgccctcaaggccatgcactcagccaacgtgctgcaccgagacttgaagccctccaacctcctcctcaacgccaactgtgatctcaaggtttgcgattttggtcttgcgcgatccgctgcttcccaggaggacaactccggtttcatgactgaatacgtcgcgactcgatggtaccgtgcgcccgagatcatgttgactttcaaggagtacaccaaggctattgatgtgtggtcggttggctgcattctcgccgagatgctcagcggcaagcctcttttccctggcaaggactaccaccaccagttgacactcattctggatgtgctgggcacgccgactatggaggattactacggaatcaagtcgcgccgcgctagagaatacattcgatcgctccccttcaagaagaaggttcccttccgaactctattccccaagacctcggatctggccctcgacctgctcgagaagctcctcgcattcaaccctgttaagcgcattaccgtggaggaagctctgaagcacccataccttgagccttaccacgatcccgaggatgagccaacagcgcccccgatccctgaggagttctttgactttgacaagcacaaagacaacctgagcaaggagcagctgaagcagttgatctaccaggagattatgaggtaa

SEQ ID NO: 349 - DNA, 1074 bp, Fusarium oxysporum
  source 1..1074: mol_type = genomic DNA
atggccgagttcgtacgcgcccagatctttggcaccacattcgagatcacctcgagatactccgatctccagcctgttggcatgggagcttttggcctcgtttgctctgcccgggatcaacttaccaaccaaaatgtcgcagtcaagaagatcatgaagcctttcagcacacctgtgctcgcaaagcgcacataccgtgagctcaagctgctcaagcacctcaagcacgaaaacgtcatttctctcagcgacatctttatttctcctttggaagatatctattttgtcacagagctcctcggtaccgatcttcaccgattattgacatcgcgccctcttgagaagcagttcatccagtacttcctctaccaaattatgcgaggtctgaagtacgtgcattcggccggcgttgtccaccgcgatctcaaacccagcaatatcctcgtcaacgaaaactgtgatctcaagatttgcgactttggtcttgcacgaatccaggaccctcagatgactggttatgtctccacacgatactaccgagcccctgaaattatgctcacctggcaaaaatacgacgtcgaggttgatatttggagtgccggttgcatttttgctgagatgcttgagggcaaacctttgttccccggaaaagatcacgtcaaccaattctctatcatcactgagctacttggtacccctcctgatgatgttatcaacaccatcgccagcgagaacacactgcggttcgtgaagtcgctgcccaaacgcgagcgacagcctcttcgtaacaagttcaagaatgccgacgattcggctattgatctgctggagcgcatgcttgtcttcgaccctaagaagcgaataactgccacagaggccctgtcccacgactatctctctccctaccacgaccccacagacgagcccgtggcggaggagaagtttgactggagcttcaacgacgccgatctccccgttgatacatggaaaatcatgatgtactcggaaattctcgattatcataacgtggaagccggagttactaacatggaggagcaattcaacggacaataa

SEQ ID NO: 350 - DNA, 1965 bp, Fusarium oxysporum
  source 1..1965: mol_type = genomic DNA
atgtctgcctccgactcgatcccggcccccccggaggactggaaggatctgtcgacacctgcatctccaggctctgaagattcgtcagaacccagtacgccgctcgaatctcccggtcatgatagccccagtgagcctcctcgaagagtaccatctctgcgctccgtttccgatcctcgcaacatgaatccgaactcaactgctatgggtgttttaggcatggccagacgccctgtacaaacatcctcgagttttgctggaagtagtagtgcctcggtggaaaacagtataatggccaaagcccgagcattacatcaacaacgcatgcagaagggcatgtctcccgctggaatccccggaacaccctcggggtcatcacctacggccagcgtcgctaacggattccctaccaatctgggattgccgcccaatatgcaacgaccgcacgcaccacatgtaaattcagctcctgcgataacgaagccctcgctgagtgagagaagggccatgggcggcggcatgggcatgaagctgtctgatatgggtagacccagccctgtcaccgccactgggaagaaacgggggcctcctggaaagctttctgatatcacaggtgatgcgccaggtagtcaacaatccaacggaacagggggtgggcaggggtcaaaaatggacgatttcaagaaatatattgacacagagaagggttgggtgacctttgatggcgctgccacaatcacacggacaggtgtcaactttgccaatggccaaaccttcagcatatctcttgatgaagttgaagtcttgaccgagctgggtaaaggaaactacggaacagtctacaaggtcaagcatgccaagcgaagagtccctcgcttcggacaaggcctctcgagaaagccccttcctgttcagtattcgcagtcggacccttctcccattggatctgcggaagactccgccgagggcttgccagacacgaccgacggtacaacgggcacagtaatggcgatgaaagaaatgcgcctggagctcgacgacgccaaattcacaaccattctgaaggagctcgtcatcttacacgagtgtgtttctccgtatatcatcgacttttacggcgccttcttccaggaaggtgctgtttacatgtgtattgagtatatggatggcggatctatcgataagctgtataatggtggtatcccggagaatgttcttcgaaaaatcacatactctaccgtgatgggtctcaaatcactgaaggaggagcatagcattattcatcgcgatgtcaaaccaacaaacatcttggtcaatacacgaggccaggtcaagatttgcgattttggtgtcagtggtaatctggtagctagtatagcgcgaaccaacatcggctgtcagagctatatggcccccgagagaatctctggtggtggattcgcacaagccggtaattccgatggctcatacagcgttcagagcgatgtctggagtttgggcctgaccatcatcgagtgtgctaagggcgcttatccttacccaccggaggtctcttctactattttcagccaactgagtgctattgttgaaggtgaaccacctgctatgccagaggacacttactcggacatggccaaggattttgtgaaaagctgtcttcacaagattcctatgaagcggccaacctacgccatgctattgaaacatccgtggctcgtcgaatttacaaagcctcaaacaatcacggaagaagctgaggagggtgatggagttgatacggtcgcggaagctgttggtaaaattgatttgagctcatcaactgcagatactgaagtggcagattgggtcaatggcgttctacaacgagagaaagatggcctgaaggaggacgggcccttgaaaccagcactacacaatgcaccgcttgatagcgtcagtcctatgtcaagcccaaaggatgcatga

SEQ ID NO: 351 - DNA, 108 bp, Medicago truncatula
  source 1..108: mol_type = genomic DNA
gcnttyathcarytnwsnaarccntgyathwsngayaargartgywsnathgtnaaraaytaymgngcnmgntgymgnaarggntaytgygtnmgnmgnmgnathmgn

SEQ ID NO: 352 - DNA, 120 bp, Fagopyrum esculentum
  source 1..120: mol_type = genomic DNA
gcncartgyggngcncarggnggnggngcnacntgyccnggnggnytntgytgywsncartggggntggtgyggnwsnacnccnaartaytgyggngcnggntgycarwsnaaytgyaar

SEQ ID NO: 353 - DNA, 120 bp, Fagopyrum esculentum
  source 1..120: mol_type = genomic DNA
gcncartgyggngcncarggnggnggngcnacntgyccnggnggnytntgytgywsncartggggntggtgyggnwsnacnccnaartaytgyggngcnggntgycarwsnaaytgymgn

SEQ ID NO: 354 - DNA, 558 bp, Capsicum annuum
  source 1..558: mol_type = genomic DNA
atgatgaaygcnaayggnttywsnggngtngaraargartayathmgnaarcaycayytncaycarccnaargaraaycartgywsnwsnttyytngtnaarcayathmgngcnccngtncayytngtntggwsnytngtnmgnmgnttygaycarccncaraartayaarccnttygtnwsnmgntgyathgcncarggngayytngarathggnwsnytnmgngargtngaygtnaarwsnggnytnccngcnacnacnwsnacngarmgnytngarytnytngaygaygargarcayathytnwsnttymgnathathggnggngaycaymgnytnmgnaaytaywsnwsnathathwsnytncayccngargtnathgayggnmgnccnggnacnytngtnathgarwsnttygtngtngaygtnccncarggnaayacnaargaygaracntgytayttygtngargcnytnathaaytgyaayytnaarwsnytngcngaygtnwsngarmgnytngcngtncargaymgnacngarccnathgaycargtn

SEQ ID NO: 355 - DNA, 981 bp, Phaseolus vulgaris
  source 1..981: mol_type = genomic DNA
atgaaraaraaymgnatgatgathatgathtgywsngtnggngtngtntggatgytnytngtnggnggnwsntayggngarcartgyggnmgncargcnggnggngcnytntgyccnggnggnaaytgytgywsncarttyggntggtgyggnwsnacnacngaytaytgyggnaargaytgycarwsncartgyggnggnccnwsnccngcnccnacngayytnwsngcnytnathwsnmgnwsnacnttygaycargtnytnaarcaymgnaaygayggngcntgyccngcnaarggnttytayacntaygaygcnttyathgcngcngcnaargcntayccnwsnttyggnaayacnggngayacngcnacnmgnaarmgngarathgcngcnttyytnggncaracnwsncaygaracnacnggnggntgggcnacngcnccngayggnccntaygcntggggntaytgyttygtnmgngarmgnaayccnwsngcntaytgywsngcnacnccncarttyccntgygcnccnggncarcartaytayggnmgnggnccnathcarathwsntggaaytayaaytayggncartgyggnmgngcnathggngtngayytnytnaayaarccngayytngtngcnacngaywsngtnathwsnttyaarwsngcnytntggttytggatgacngcncarwsnccnaarccnwsnwsncaygaygtnathacnwsnmgntggacnccnwsnwsngcngaygtngcngcnmgnmgnytnccnggntayggnacngtnacnaayathathaayggnggnytngartgyggnmgnggncargaywsnmgngtncargaymgnathggnttyttyaarmgntaytgygayytnytnggngtnggntayggnaayaayytngaytgytaywsncaracnccnttyggnaaywsnytnttyytnwsngayytngtnacnwsncar

SEQ ID NO: 356 - DNA, 1020 bp, Oryza sativa
  source 1..1020: mol_type = genomic DNA
atgwsnacnccnmgngcngcngcnwsnytngcnaaraargcngcnytngtngcnytngcngtnytngcngcngcnytngcnacngcngcnmgngcngarcartgyggngcncargcnggnggngcnmgntgyccnaaytgyytntgytgywsnmgntggggntggtgyggnacnacnwsngayttytgyggngayggntgycarwsncartgywsnggntgyggnccnacnccnacnccnacnccnccnwsnccnwsngayggngtnggnwsnathgtnccnmgngayytnttygarmgnytnytnytncaymgnaaygayggngcntgyccngcnmgnggnttytayacntaygargcnttyytngcngcngcngcngcnttyccngcnttyggnggnacnggnaayacngaracnmgnaarmgngargtngcngcnttyytnggncaracnwsncaygaracnacnggnggntggccnacngcnccngayggnccnttywsntggggntaytgyttyaarcargarcaraayccnccnwsngaytaytgycarccnwsnccngartggccntgygcnccnggnmgnaartaytayggnmgnggnccnathcarytnwsnttyaayttyaaytayggnccngcnggnmgngcnathggngtngayytnytnwsnaayccngayytngtngcnacngaygcnacngtnwsnttyaaracngcnytntggttytggatgacnccncarggnaayaarccnwsnwsncaygaygtnathacnggnmgntgggcnccnwsnccngcngaygcngcngcnggnmgngcnccnggntayggngtnathacnaayathgtnaayggnggnytngartgyggncayggnccngaygaymgngtngcnaaymgnathggnttytaycarmgntaytgyggngcnttyggnathggnacnggnggnaayytngaytgytayaaycarmgnccnttyaaywsnggnwsnwsngtnggnytngcngarcar

SEQ ID NO: 357 - DNA, 759 bp, Solanum chilense
  source 1..759: mol_type = genomic DNA
atgaarttyaayathgtnwsnccngtngcnytnwsntgyytnttyttyytnttyytnacnggnacnytngcncaraaygcnggnwsnathgtnacnmgngarytnttygarcaratgytnwsnttymgnaayaaygaygcntgyccngcnaarggnttytayacntaygaygcnttyathgcngcngcnaaywsnttyccnggnttyggnacnacnggngaygayacngcnmgnaaraargarathgcngcnttyttyggncaracnwsncaygaracnaarggnggnwsngcnggnacnttyacnggnggntaytgyttygtnmgncarathgaycarwsngaymgntaytayggnmgnggnccnathcarytnacncaycarwsnaaytaygarmgngcnggncarggnathggngtnggncargayytngtnaayaayccngayytngtngcnacngayccnathathwsnttymgnacngcnathtggttytggatgacngcncargayaayaarccnwsntgycayaaygtnathathggncartggacnccnwsnccngcngayacngcngcnaaymgngtnccnggntayggngtnathacnaayathathaayggnggnytngartgyaayatgggnccnaayacngcngtngarwsnmgnathggnttytaymgnmgntaytgyggnatgytnaaygtnccnacnggngaraayytngaytgyaayaaycaraaraayttygcncarggn

SEQ ID NO: 358 - DNA, 998 bp, Hordeum vulgare
  source 1..998: mol_type = genomic DNA
ctacgacagtagcgtaagcgtaacaccgagtacgtactctgtgctttgttggctcgcacaatgagatcgctcgcggtggtggtggccgtggtagccacggtggccatggccatcggcacggcgcgcggcagcgtgtcctccatcgtctcgcgcgcacagtttgaccgcatgcttctccaccgcaacgacggcgcctgccaggccaagggcttctacacctacgacgccttcgtcgccgccgcagccgccttcccgggcttcggcaccaccggcagcgccgacgcccagaagcgcgaggtggccgccttcctagcacagacctcccacgagaccaccggcgggtgggcgactgcaccggacggggccttcgcctggggctactgcttcaagcaggaacgtggcgcctcctccgactactgcaccccgagcgcacaatggccgtgcgcccccgggaagcgctactacggccgcgggccaatccagctctcccacaactacaactatggacctgccggccgggccatcggggtcgatctgctggccaacccggacctggtggccacggacgccactgtgggctttaagacggccatctggttctggatgacggcgcagccgcccaagccatcgagccatgctgtgatcgccggccagtggagcccgtcaggggctgaccgggccgcaggccgggtgcccgggtttggtgtgatcaccaacatcatcaacggcgggatcgagtgcggtcacgggcaggacagccgcgtcgccgatcgaatcgggttttacaagcgctactgtgacatcctcggcgttggctacggcaacaacctcgattgctacagccagagacccttcgcctaattaattagtcatgtattaatcttggccctccataaaatacaataagagcatcgtctcctatctacatgctgtaagatgtaactatggtaaccttttatggggaacataacaaaggcatctcgtatagatgctttgct

SEQ ID NO: 359 - DNA, 978 bp, Oryza sativa
  source 1..978: mol_type = genomic DNA
atgmgngcnytngcngtngtngcnatggtngcnacngcnttyytngcngcngcngtncaygcngarcartgyggnwsncargcnggnggngcngtntgyccnaaytgyytntgytgywsncarttyggntggtgyggnwsnacnwsngaytaytgyggngcnggntgycarwsncartgywsngcngcnggntgyggnggnggnggnccnacnccnccnwsnggnwsnggnggnwsnggngtngcnwsnathgtnwsnmgnwsnytnttygaycaratgytnytncaymgnaaygaygcngcntgyccngcnwsnaayttytayacntaygaygcnttygtngcngcngcnwsngcnttyccnggnttygcngcngcnggnggngaygcngayacnaayaarmgngargtngcngcnttyytngcncaracnwsncaygaracnacnggnggntgggcnacngcnccngayggnccntaygcntggggntaytgyttyaargargaraayggnggngcngcnggnccngaytaytgycarcarwsngcncartggccntgygcngcnggnaaraartaytayggnmgnggnccnathcarytnwsntayaayttyaaytayggnccngcnggncargcnathggngcngayytnytnggngayccngayytngtngcnwsngaygcnacngtnwsnttygayacngcnttytggttytggatgacnccncarwsnccnaarccnwsntgycaygcngtngcnacnggncartggacnccnwsngcngaygaycargcngcnggnmgngtnccnggntayggngtnathacnaayathathaayggnggnytngartgyggncayggngargaygaymgngtngcngaymgnathggnttytayaarmgntaytgygayathytnggngtnwsntaygaygcnaayytngaytgytaywsncarmgnccnttyggnwsn

SEQ ID NO: 360 - DNA, 1098 bp, Brassica juncea
  source 1..1098: mol_type = genomic DNA
aaataaaattcatcaaaataacccatccaaaagagtccaaaataacaaatgacaattccacctttattttaacaaaaattatattcaaactagacaaacatgataattgtgatatagtttctcaacaagtttcaaaaacaattatagttttccaccataattgtaaacacacatattttcgccaaaaccataaaatatatattctcgctaaaacaacaagaaaaacatttgtccgtgaattccatctcttctcataaacttcatcttccatcgtatcaagcgaacccatcctattggggggtatgtgattcatgagccttaattagggtggtacagtcagcgactcctgagcttcagagagggtagtccagcagctagtgactctgctagagatagtgtggcccagctagtgagtagtgactcatgaggtagagagagggtggtccatcatatatcgtgttagacaaattctatatagacaatgaggtaaatgtgggatatgaaggtggtggcaaattttagaacaattagtatttaagtatagtaaacataaaaacaaaccagcactgcttatcttcgattctatcaagcgaacccaccttatattgaattaatttatggtagcagtgattcgtgaacgtcagagagggtggtccctctagtgactcatgagctagagagagggtggtccagctatcgtgtagaaatattctatagaccattagataaacgtgccaaatgaacttggtggtgacaaaatagaagtttagaatgtttgggttcccggtaaaaaggtgaaaccacctttttttttttttttttttaccaacgttgaattggcctaatgataaaagggttacgcttgtaactaccgccacccaggtttaattcacggtgggagagactatttataatgcttaggtttctggcaaagaagtgaaaccactttttttctttccagaaaaaatagaagtctagaaaacataaaaacaagtatataaaattcgatgtgatttaacactaactgattttgtacattgcatgttgctatatatacccttacttgcctcttaaaacaaccatacagctcagagaaac

SEQ ID NO: 361 - protein, 36 aa, Medicago truncatula
AFIQLSKPCISDKECSIVKNYRARCRKGYCVRRRIR

SEQ ID NO: 362 - protein, 40 aa, Fagopyrum esculentum
AQCGAQGGGATCPGGLCCSQWGWCGSTPKYCGAGCQSNCK

SEQ ID NO: 363 - protein, 40 aa, Fagopyrum esculentum
AQCGAQGGGATCPGGLCCSQWGWCGSTPKYCGAGCQSNCR

SEQ ID NO: 364 - protein, 186 aa, Capsicum annuum
MMNANGFSGVEKEYIRKHHLHQPKENQCSSFLVKHIRAPVHLVWSLVRRFDQPQKYKPFVSRCIAQGDLEIGSLREVDVKSGLPATTSTERLELLDDEEHILSFRIIGGDHRLRNYSSIISLHPEVIDGRPGTLVIESFVVDVPQGNTKDETCYFVEALINCNLKSLADVSERLAVQDRTEPIDQV

SEQ ID NO: 365 - protein, 327 aa, Phaseolus vulgaris
MKKNRMMIMICSVGVVWMLLVGGSYGEQCGRQAGGALCPGGNCCSQFGWCGSTTDYCGKDCQSQCGGPSPAPTDLSALISRSTFDQVLKHRNDGACPAKGFYTYDAFIAAAKAYPSFGNTGDTATRKREIAAFLGQTSHETTGGWATAPDGPYAWGYCFVRERNPSAYCSATPQFPCAPGQQYYGRGPIQISWNYNYGQCGRAIGVDLLNKPDLVATDSVISFKSALWFWMTAQSPKPSSHDVITSRWTPSSADVAARRLPGYGTVTNIINGGLECGRGQDSRVQDRIGFFKRYCDLLGVGYGNNLDCYSQTPFGNSLFLSDLVTSQ

SEQ ID NO: 366 - protein, 340 aa, Oryza sativa
MSTPRAAASLAKKAALVALAVLAAALATAARAEQCGAQAGGARCPNCLCCSRWGWCGTTSDFCGDGCQSQCSGCGPTPTPTPPSPSDGVGSIVPRDLFERLLLHRNDGACPARGFYTYEAFLAAAAAFPAFGGTGNTETRKREVAAFLGQTSHETTGGWPTAPDGPFSWGYCFKQEQNPPSDYCQPSPEWPCAPGRKYYGRGPIQLSFNFNYGPAGRAIGVDLLSNPDLVATDATVSFKTALWFWMTPQGNKPSSHDVITGRWAPSPADAAAGRAPGYGVITNIVNGGLECGHGPDDRVANRIGFYQRYCGAFGIGTGGNLDCYNQRPFNSGSSVGLAEQ

SEQ ID NO: 367 - protein, 253 aa, Solanum chilense
MKFNIVSPVALSCLFFLFLTGTLAQNAGSIVTRELFEQMLSFRNNDACPAKGFYTYDAFIAAANSFPGFGTTGDDTARKKEIAAFFGQTSHETKGGSAGTFTGGYCFVRQIDQSDRYYGRGPIQLTHQSNYERAGQGIGVGQDLVNNPDLVATDPIISFRTAIWFWMTAQDNKPSCHNVIIGQWTPSPADTAANRVPGYGVITNIINGGLECNMGPNTAVESRIGFYRRYCGMLNVPTGENLDCNNQKNFAQG

SEQ ID NO: 368 - protein, 326 aa, Oryza sativa
MRALAVVAMVATAFLAAAVHAEQCGSQAGGAVCPNCLCCSQFGWCGSTSDYCGAGCQSQCSAAGCGGGGPTPPSGSGGSGVASIVSRSLFDQMLLHRNDAACPASNFYTYDAFVAAASAFPGFAAAGGDADTNKREVAAFLAQTSHETTGGWATAPDGPYAWGYCFKEENGGAAGPDYCQQSAQWPCAAGKKYYGRGPIQLSYNFNYGPAGQAIGADLLGDPDLVASDATVSFDTAFWFWMTPQSPKPSCHAVATGQWTPSADDQAAGRVPGYGVITNIINGGLECGHGEDDRVADRIGFYKRYCDILGVSYDANLDCYSQRPFGS

SEQ ID NO: 369 - protein, 135 aa, Arabidopsis thaliana
MEGKTVIFSVLVMGLVISQIQVEAQKTCCPSQSTRKEFEDCISEGNLQILCSAESGCRDTYVGYCPSGFPYGSLTNSGDVVNVYCKLGCVSSLCGALTSLQKLDTSGKVNVAVERCTKACSTICTKGSKTAVETV

SEQ ID NO: 370 - protein, 61 aa, Vigna mungo
PNPKVFFDMTIGGQPAGKIVFELFADTTPRTAENFRALTTGEKGVSRGRKPLHYHGSIFHR

SEQ ID NO: 371 - protein, 512 aa, Camptotheca acuminata
MENLYYCLALLLSILFIFRHFFRHSSKLPPSPFALPIIGHLHLIRNSLHQVLECLASQYGPILFLKFGTRSILVVSSPSAVEECLIKNDIIFANRPRSMILDLSSFNYSIFSWAPYGHYWRSLRRLAVVELFTSRSLQTSSNIRKEEIHNLLCHLFKFSKSGTQKLQLKYWFSLLTFNIITRLVAGKRCVRDAVAGTDSGKQILEDLEGKFTSKMPFNMCDFFPILRWFGYKGLEKILITLHKERDEFMQGLIDEVRRKRTCSANINSVTNRAKTTLIEALLSLQESEPDFFSDTIIKSIISDMFFAGPETSTITLEWAMSLLLNHPEVLGKLRAEIDDHVGHGRLLDDSDLGKLPYLRCIINETLRLYPPTPLLLPHCSSEDCIVGGYEIPQGTILWVNAWAMHRDPKLWEEPTKFKPERFEGMEGRERYKFMPFGIGRRACPGASMAIRTVSLALGALIQCFEWENVGPDKREMSQGRLTLPKAESLEAVSIPRPSAVKVLSQLEGTCFR

SEQ ID NO: 372 - protein, 105 aa, Nicotiana alata
MARSLCFMAFAILAMMLFVAYEVQARECKTESNTFPGICITKPPCRKACISEKFTDGHCSKILRRCLCTKPCVFDEKMTKTGAEILAEEAKTLAAALLEEEIMDN

SEQ ID NO: 373 - protein, 266 aa, Triticum kiharae
MGVKGGGVLWCLLLAGLLLLAVACAAERDTEKEKEEEIRWCEEDCDWKAGQDTGKARECKEQCERRRHGHELLQEDGDSFDSCVSKCRGHGGWWGKERWERCRQICRQSQEGEGGDEGDNTDDRCERMCQHYHDRREKKQCMKGCRYGESDLLSSDDGHEHGDRCQTQCKRLRPGSYDRQQCIEKCQCQQKEDEEVMNHHGGGGHGHGGSSCEQKCQQRYRHEYDKQQCVRDCKSGGGGGAGGRGREGDERQHGREMVIEAILEEV

SEQ ID NO: 374 - protein, 320 aa, Euonymus europaeus
MKYLWVFIVFSIAVLSHACSAQQCGRQAGNRRCANNLCCSQYGYCGRTNEYCCTSQGCQSQCRRCGVRTVGEIVVGDIGGIISKGMFNNILKHRDDDACEGKGFYTYEAFVAAARSFPAFGSTGDDATRKREIAAFLAQTSHETSAGWPSAPDGPYAWGYCFVRERNPPSKYCDTTTPCPKSYYGRGPIQLTWNYNYEQAGRAIGADLLNNPDLVATDAVISFKTAIWFWMTAQSSKPSCHDVITGSWRPSASDNSVCHVPDYAVVTNIISGEIEYGKSRNPQVEDRIEFFKRYCQILGVSPGKCYEERTFVSGLMMETI

SEQ ID NO: 375 - protein, 305 aa, Euonymus europaeus
MKYLWVFIVFSIAVLSLACSAQQCGRQAGNRRCPNNLCCSQFGYCGRTNEYCCTGFGCQSNCRRCGVRTVGEDVVGDIGGIISKGMFNNILKHRDDDACEGKGFYTYEAFVAAARSFPAFGSTGDDTTRKREIAAFLAQTSHETSGGRPSAPDGPYAWGYCFVKERNPPSKYCDTITPCPKSYYGRGPLQLTWNYNYAQAGRAIGVDLLNNPDLVATDAVTSFKTAIWFWMTAHSSKPSCHDVITGSWRPSASDNSVRHVPDYAVVTNIINGEIEYGKSRNPQVEDRIEFFKRYCQILGVSPGKF

SEQ ID NO: 376 - protein, 38 aa, Taraxacum officinale
VAKCTEESGGKYFVFCCYKPTRICYMNEQKCESTCIGK

SEQ ID NO: 377 - protein, 44 aa, Taraxacum officinale
GGKCTVDWGGQGGGRRLPSPLFCCYKPTRICYLNQETCETETCP

SEQ ID NO: 378 - protein, 42 aa, Taraxacum officinale
ANKCIIDCMKVKTTCGDECKGAGFKTGGCALPPDIMKCCHNC

SEQ ID NO: 379 - protein, 49 aa, Triticum kiharae
RTCQSQSHKFKGACFSDTNCDSVCRTENFPRGQCNQHHVERKCYCERDC

SEQ ID NO: 380 - protein, 47 aa, Echinochloa crus-galli
RECQSQSHRYKGACVHDTNCASVCQTEGFSGGKCVGFRGRCFCTKHC

SEQ ID NO: 381 - protein, 47 aa, Echinochloa crus-galli
RECQSQSHRYKGACVHDTNCASVCQTEGFSGGKCVGFRGRCFCTKAC

SEQ ID NO: 382 - protein, 30 aa, Amaranthus caudatus
AGECVQGRCPSGMCCSQFGYCGRGPKYCGR

SEQ ID NO: 383 - DNA, 3666 bp, Oryza sativa
  source 1..3666: mol_type = genomic DNA
atggaggccacggcagtgagcattggcaggtccgtgctgaagggagcgcttggctttgccaattccaccttggtggaggaggtttccctgcagctcggcgtccagcgcgaccaggcgttcatcagggacgagctggagatgatgaactccttcctgatggccgccaatgatgagaaagatgacaacaaggtggtaaggaccttggtgaagcaggtccgcgacgtggcctacgacgtcgaggactgcctccaggacttcgccgtccgcttggggaggaagagttcatcctggtggctcagccctcacacgctgtgggagcggcgccgcatcgccaagcagatggaggagctgaggggcaaggttgaggatgtgagccagaggaacatgcgttaccaactcatcaagggctccaagcctaccgtagctaccaatgtcgcacccagcagcactgcccgtgcgaccatgtctggcgcgcatgaagaacgatggcagcatgagaaggcaatagatcatctggttcggctggtcaaaaccaaagtcgatgaacgtagagtgatcgcggtgtggggaacaagtggtgatatcagggaaatgtccatcgttggaggggcctatgatcatctcaagagaagcaacaagtttgagtgctgtgcctgggtaaatttgatgcatccactgaacccaacaaagctcctgcaaaccattgttaggcaattctatgtaagatctcttcaggaggctggcaaagcaactccgtcgtgtcaaattctgagtagcatgttgataaaggaagatcagggtttggggtttagggttctgaggagcatgctgatgaaggaagatcatttgaatgatgagttcaataaatatttgagtgacaagtgctacctcattgtgcttaatgacctatcgtccgctgaagagtggaagcaaattaaaatgctcttcccagacaacaagaaaggaagccgaatcatagtgttcacacaacaagttgaagttgcaagcttttgcgctaggacagaggaggtggcacccgagcacatgcagttgtttgctgatcagactctttatgcttttcactgcaagggtgctaaagatggagtagattcaatggaggactcatctaacttaaacgaagacactacatacaacgctgtagaaggaaagagccttactcgcacatattcaatggtaactgctttcaaggaatctgagatcgttgggcgagttgatgaaataaaggagattattgaactgatttcaaaaggtagcaaccaacttgagaagatctcagtgtggggaatgggtggtattgggaaaaccactctaattcaaaatgtctaccgaagcgaaaaggttaagaagatgtttgataagcatgcatgtgtcacgatcatgcgcccgttcaatcttaatgatcttcttatgatcttagttaggcaactagaagattcaaaaacttctggaggaaaggagttggttagcattttacaaggaaagaaatacttgattgttcttgatgatgtattattcacaacagaatgggatgctatagaatcatatttcccagcaacggaaacaggaagccggatcataataaccacaaggcatgaaagtattgctaagcattgttcaggggatcaacaaggaaaaatgtatcaactcaatcgtctaggagacaacgatgcaaagaacctctttgcaaagaaggtatttaaggagtcagtaaatttggatcaacaagatcttgaattgatcaaagaagcgaaaccgattctaaagaagtgcaatggacttcccctcgcaattgtcaccataggtggtttcttggcaagcagccccaaaactgctttggagtggagaaaattgaatgagcatattagtgcagagttggagacaaacccagggcttgaggccatcagagctgtccttaatataagctacgatggattaccttatcacctcaagtcttgcttcttgtatctgtccatctttcctgaagatgacaagattagccgggaacgtttggtgcgccgatggtgtgcagagggttactcaagggagctatgggacaaatctgcagaggaaatagcaaacaactacttctttgaactcatagacagaagcatgatcctaccaactcaaaaattaacttacaacaatagacctgattcttgccaggtccacgatatcatgcgcgagatagccatctcgaagtcaaaggaggaaaatcttgttcttagactcgaagggggtcataggctacacaatcatggcatagttcgacatctttccattacaaacagcggcgaggatcgggagacagattttgctgaattggagacaacagtagacatgtcccgaataagatcattaacagtgtttggggagtggaagccatttttcatttctgacaagatgaggttgttgcgtgtgctcgacttggaagacacagaaggtgtacgtaatcaccatattaagcaaattgggaagctccttcaccttagatacctttctctaaaacgatgtagggagattgcttacctgcctgattccttaggtaacctaaggcaactggagatactagatatcagaggtacgctcatagtcaggctgccaaagaccatcatcaatcttcgcaagctaaagtatctccgtgctgttccaaacatagacgacatagcagagattctaattctaccagagctcatgaggaacaggctatgcatttctactgtttcgttgctggggctttgtctgctatgctcagcaagtgcgattggtaagtttgatgaagagactagtacccgtgacctctgcaccatgtggtgctgcagtattctccctagcattgctatgcgcctccaagggaatggtgtagtagcaccaagagggctgaggatcaggagactgacagccctgcacacgctaggtgtggtggacatttcatggcagccatcaattttacaagatatcaagaggctcatccagctgcgcaaattggaagtgaccggtgtcaacaagaaaaatagcaaaaagcttttctctgcccttgccgctctcagccaactagaatcattgtcactgttctcgaagtggaagccaggtctctggggctgtctggatgctgaagaaaagttttcgccacctaagaatctcaagactctgaagcttcaaggcaacctggttgagctgccaaaatggatcgggaagctcaacaatcttgttaagctgaagctatcaaaatccaggctcaaggatcatgatgctgctatacaagtccttggtatgctaccaaacctgaccatcctatgcctgccgcgcaagtcatttcactcgcttgagggtggtgaactcaatttctcggagggatctttcaaaagcctggtggttctcgagctccacttcggtgggagcaaacgcgtcaagtttcaacaaggagcattccacaatcttgagctactggagctttcaggttacattgataaagtcgaaactaagttctctgggctagaatttctcccaggaatcaaggaagtctggctccagggtgaattttattccagaaacgagcaagccgcacgaagattgaaagaggacttgctggcacagctttctgagaatccaaagaaaccaatcctgaagactagcgggtatttttag

SEQ ID NO: 384 - DNA, 9576 bp, Oryza sativa
  source 1..9576: mol_type = genomic DNA
ggaaatactagaatgacttacattgtaaaacagagaaagtatgattatctaaactctcagatagtctattgtaatcattgtatgcatgacatcagcttgtgtcaaagctgcagctttgttggatcaaccagaatttactagttctaaaaaaaacagaatttacttagatcctgctgaaagacttcgggccaattagaagcccagtatttggcccaaaactggtgtaaactacaggcccataatagaaataagttcactggaggtcccccaacttaacaccgagatttttttgaggtcccttaaccataaaccagaaatgcgtacccctaaactatgtaaaaccgtcaaaaaaaaaaaggtcccgaggcagtatagttgctcggtttcgctgacgtggcatcctagtcagcaaaaaaaattaaaataaatatgtggggcccacatgtaagtgagagaaaatggtgtgggccccacatttctcctttcttttctttttctcttctcttctctcccgattttctcgagtgggcgcggcggcagaggggagagaggtgaccggcggtggagcgggggtggtgggagaggggggctggcgcgacgtcggcggcgggagaaaaggagaggaggcggctggcgcgacggcgagctcggacggcaacggcgggaggaggaggaggagaggaggcagtcggcgctgtaaaacgcgcatgggatgcggcggatgatgtcgagcgggacggtgtcctcatcaccatcttcctcatcgtcatcgcagtctgcgggtgccgggcggagcggtttgggagggagggggaggcggccagcgagcccgttcgagctcgcccggcctgcgcgcgagctcgcccctcccatagcttggtgtgctggggacgacgacgaggaaagggggagaaaggaattgacggccgatgatagcaatggcgggcgagcgcggcgccgggctgctcatgctcgccgaccaggcccccggcttcgccgcactcgtccgccgtgctcgcccacgcactcgccgacctccgctccacccgccgctcctgcccgctgcccgctgcccgccggcctccctgactgaagaagagaagagagaaattaaagagaagagaaggagaagaaaagagaagagaagaaaaaaagatgtgtagctgacatgtgggccccatgtacttttttattttttttgctgactagaatgccacgtcagcgaaaccacccatatatactgtcataggaccttgagtgcatagtttgtgtgagtttagggatacacatttctcgttttgtagttaagggacctcgtaaaaatctcgctgttaagttgagagacccctccggtgaacttattcccccaaatattttctccatgctctgggctcaaacgcactcttggatgggccgtgtaatctacaccatttctggcccaatccaacgaaggtagctccagactcctaactccgccgccgcatgcccaatcctcgccggccgccgctgccatctcccttcccccaccgccaccgtcgccttctccgttcccccaacaaaggctcagtagcagcagccgcggcgcggagagcagaggccttggagggcctgcagaggagcgcccgcgtcgacgaagacgacatcagcaggcagtggacatggcgactgcgaatgctatcgccgacgtgggagcttcaggcgaggatgcgtggccttcatcagctgctgctcccttacctgctctggtttgtcattgtgttggttcgtggtttggggatatcaggatggggaaggggaatgggtttcgtgccatgttgttctattgtgcaatttgatgttctcttgtcgaatttcatggtgattcaatctgcatctgtgttattggttgtcaagcaaacattttatttctttcgagatgggtgtttcatctgaaattggtgtgtctgatgatgtgaccttgtgcaaatcattgtttcattttcttctattccacagagatttttttgtttagagtttattctaccatcttcttaccttttgaatgctatgcaccacagatttctgatttttacacattcaatcacagtgccgacccttggcgaatttaaaattttctcaccgtcaaaatttaatcaaacatctgatctaacagtagtagcgccagcacggctggtatttaaggcagaaagaaaggttgcgagggcgaggagttggtgatgatctgccggtcgtgtcgtgactttaggctataaaagatagctgtttggattaacccaaccaatgaagcgaatcatcgatggccgatagcgagattatatccaactaatgaagagaatcaactttaatcttttgtgagctacaagtttcgtggtgaaggcatatactaataccaccatcatggctgcagcgaatcaacgagatgcatttgtcttgcacatttcccaccggatactttgccatccatggctttatctcctccatgattgtatccccttcttcctcaacaaggaacgatcgatcattgtttgcttctttctctgacgacactttggtgcaagtgaaaggctctttcctggaactcgtcccgtgagctccttcctggctacatcctccttaattccttgccgatttccggcttcgtcttcactatcgtcagttcatttctcccgctctgcctgagagtccagtttcttggagatagtcgccggcttgctctctctctctctctcccttctcatcgccagctccagctcacaatccgagcttacgtggtggaatcgctatcgccacctctcggaagattattgtactttgccttgcctacttcttgagtccgatcaaacacatccatcatgcatctgtttgtacttgcattcagccaaacacttccagtttaactccgtccgcaagtcaatacttgcattcaatttccatttcctacaaaagcagctgctcagactcttgccttctccacccagcaatcgtgtttccttccctgtatcctgcgcgtgtgttcttagctgctctaggggatccttccaatggcggagctaatggccaccatggtggtcgggccactgctgtccatggtgaaggacaaggcctccagctacctcctggagcagtacaaggtgatggagggcatggaggagcagcacgagatcctcaaacgcaagctgccagccatcctcgacgtcatcgccgacgccgaggagcaggcggctaaacacagggaaggggtgaaagcatggctcgaggcgctccggaaggtggcctaccaggccaatgacgtcttcgacgagttcaagtacgaggcactccgccgcaaggccaaggggcactacaagatgctcagcagcatggttgtaatcaagctcattcctactcacaaccgtattctgttcagttataggatgggcaacaagctcaggatgattctgaatgccattgaagttctaattgaagagatgaatgcctttaggtttaaattccgaccagagccaccaatgtcgtccatgaaatggaggaagacagattctaaaatctccgacctttctttggacattgccaacaactcaagaaaggaagataaacaggagattgtcagcagattgcttgttccagccagcgaaggggatctcactgttcttcccattgtaggaatgggggggatgggcaagaccaccttagcgcagctcatttacaatgaccctgacattcagaagcatttccagttgctgctctgggtgtgtgtttccgacaacttcgatgtggatttgctggctaaaagcatagttgaagcagctcgcaaacagaagaatgataacagtggaagtactaacaagtcaccattggatgaacttaaagaagttgtgagtgggcagaggtacctcctcgttttggatgatgtctggaaccgtgatgctcgtaagtgggaagcgctcaagtcctaccttcagcacggtggcagcggtagctcagttttgacaacaactcgtgatcaagaagtggctcaagtgatggctccagctcaaaaaccttatgatctcaagagactgaaggaaagcttcatagaggaaattatcaggacaagtgctttcagttcacaacaagaaaggcctcctgagcttctcaaaatggttggtgatattgccaagaaatgttctggttcccctttagctgcaacagcattgggctctacactgcgtacgaagaccaccaagaaagaatgggaggctatattaagcagaagcacaatttgcgatgaggaaaatggaattttaccaatactcaagctcagttacaattgcttgccatcatatatgcggcaatgcttttccttttgtgcaattttccccaaggatcatgagattgacgtggaaatgctgatccagttatggatggccaatggttttatcccagagcaacaaggagagtgccctgaaatcattggtaaaagaattttcagtgagttggtgtcaaggtcattttttcaggatgcgaaagggatcccgtttgagttccatgatataaagaactctaagattacttgtaagatccatgaccttatgcatgatgttgcacaatcctccatgggaaaagaatgcgctgctatagatacagaagttagtaaaagtgaggattttccttattctgctcgccatctatttttgtcaggtgatagaccagaagctattcggactccttccccagagaaaggatatccaggtatccaaacattaatatgttcacgtttcaaatatttgcagaatgtatcaaaatacaggtcattgcgagtattaacaacgatgtgggaaggttcattcctgataccaaaatatcatcatcacctgaggtatcttgatctctcagaaagtgaaattaaagcacttcctgaagacataagcatcctatatcatttgcaaacattgaacctttcccgttgtttatctctccgtcgacttccaaagggaatgaagtacatgaccgccctccgtcacttgtacactcacggatgttggagtttaggaagcatgcctcctgacctcggacacctcacttgcctacagacgcttacatgctttgtagccggtacttgctctggctgcagtgatttgggagagctgcggcagttggaccttggtggtcgactagagctaagaaaactggaaaatgtgacaaaagctgatgcaaaagcagcaaatctcggaaagaaggaaaaactgaccaaattgaccttaatatggactgatcaggagtacaaggaggcacagagtaataatcataaagaggtgctggaaggtctcacgcctcacgaggggctcaaggttctgagtatatatcactgtgggagcagtacatgtccaacttggatgaataaactgcgggacatggtggggcttgagttaaatggttgcaaaaatctcgagaagcttcctccgttgtggcagctaccggctctacaagttctttgcctggaaggactgggtagtttaaattgcttgttcaactgtgacacacacacacccttcacattttgcagactgaaggagctaaccttgtctgatatgacaaattttgagacatggtgggacacaaatgaggtacaaggagaagagctgatgtttcctgaggttgaaaagctgtcaatcgaaagttgccataggctaactgccttgccaaaagcatcaaatgcgatttcagaatcgtccggcgaagttagcaccgtgtgtcgttctgcatttccagcattgaaggaaatgaaattatatgatttgcgtatctttcagaaatgggaggcagtcgatggaactccaagggaggaggcaacatttcctcagcttgacaaattagaaatcagacagtgcccagagctgactactctacctgaagcaccaaagctaagtgacttagagatatctaaaggcaatcaacaaatatccctacaggcagccagcagacatattacttcattgtccagtctcgttctgcatttgtccactgatgacacagaaacagcatcggtggccaagcaacaagattcgagtgatttggtgattgaggatgagaaatggagtcataaatctcccctggaacttatggtcttgagtcggtgcaaccttttattctctcacccaagtgcactggctctgtggacatgttttgctcagctcctagatctgaaaattcggtatgttgatgcgcttgtcagctggccagaagaggtgttccagggcttagtttccttgaggaagttagagatttctgtatgcgagaatctgacaggacacacacaagctcgtgggcaatctacacccgcaccaagtgaactcctgccacgtttggagtccctagagataacgtgttgtgattctattgtggaggtccccaatctaccggcgtctctcaagctattagaaattagggggtgccccggcctggagtccatcgtattcaatcagcagcaggataggacgatgttggtgagtgcagaaagctttgcagagcaggataagtcatcgttaatatcagggtccacaagcgagaccaacgatcacgtccttccacgcctagaatctcttgtaataaattggtgcgatcgtttggaggttctccatcttcctccgtccatcaagaaattgggtatttatagctgtgaaaaacttcggtccctctcagtaaagctggatgccgttcgagaattaagtatcagacattgcgggagcttgaaatcactggaatcttgcttaggagagctcgcgtcgctgcaacaactcaaactttttgattgcaagagcctggaatccttgccgaaggggcctcaagcatactcatctcttacatctcttgaaattcgtggttgttctggtataaaggtgcttccaccgagcctacagcaacgtctggatgacatcgaggacaaagaactagatgcctgctatgaaggtaatcttcagtttcttaaccgtgtaccatttagtggtaaaagtttcgagtttcgtgtctagaacccctagtcaaccattaatatgattatatgtacatagagtacaatgcgcattcataactcacttctgcagctgtgtcatctaaaccctttaaactttgagttgcatttgggtatctaatcgcatgcaaaggaatttagttatatctcccgtagccattccttatatgtgatgatctcttcctgtgattatgcttgctagtttggactatgtaattaattttgccgggtgactatgtaattacatgacttcatttagtcgccaggtgtggcatcatgcaattattatggcaaagctgtattagtcatgatcgaagccacttggtgaacttattccctgctactttgaaccaatactcattgattatttccctttaagcgtttgatatggacgacagtttaaatttgcagagctaactaacgcagcgcttgtctttacatttctctggaaactcacagctccattgcatatgtagtttgagtatacatagtttctttgaactgtcttatgcctttgaaaagcttgactatggaattctagtctatatattcaatacatatatttttttttcttttgtttgccagaggcagaagcagaaccaaagtctcgtcatcgtcaatctgcaatcagtaggctgatgtgcttgaagtagcagtttcaggaccagatgagagttgtcatcatggtttgtaacgcgtgcttgatgattgatttcgaatgaaattctagccactatccttatgcttactctctctatggtgtgacttccttgtaggatcgttaccgaatctgcaattgttgggttattaattgtgtggttgtatctcatggtagaatgtattacctacctaccctttctcaagataaactccagtaaagtcgatcgtctggttggtgtgagctgctacaagaaggatgaagccgatgatcccaaggccttgactttaagctagtcccaggttgtaagctgaagaacaacatactggagcttaaactgcttcactctttttttatccttttccttttcttgtgaactgtgatgtgtttgatctcgttcatgctccatcataagagaatcacagctagcacttccatttcaatgatgtttttcctaacatgacatgactgcagaggatacttgtgattgatcaacaacattttgcagcaacgttctctcccgataacgctgcaatggaattgatcaattggtgttcctacttattggaatgaatttcccattgtggaataaaatggaaagattggtacaatctgctgaaaaatgaactgtcgttactcaagttgaaacatgtgtcatgtgtgtaactatcagaattgttctcgacaaaatcgttgggacttgcaaggtaaaaaaaaaaaattcctcagctctgtaaatgctattgctgaactaaagttcagaaagctatagtgccgaaagatctcagatggcctactgcaacaaaattcagtacaaatgcaaaacaatgtaacattacgtggcccagcccatcatggtaagcccatactgtatgcgctgcaaactaatattagttcaggcaattactctgaaatttctgatagacgaacctgattttttcatgtcaggtgccgtgcttgttcagattcagcaacttacatttccaaagaagaaaaaggaaattcataccttctctttatttggtttttaaaagtggcctggattttcattatttggttaaaatttggcctttgtcgtaaggatttggatcctctatccaaacacatgccttccaagataaacgaatccctcattatacaaaaaaaaaagcacaagatgctcaacaagaagcttcaaattcgtgtaaatacatgtcatgtctcgctaccaaacaatatctcaacaatgacaacagattggaggtattcatctcacaatgatacatttcaacacaaatttatgtaggcctcgctgacaggacttggctggatggctgtcagttcagttcttgaaccaactgaagcatgagcagccctgcaaggaagcgataaactgaattaaaataggaatttgttacacaatacctgtaaagtggattacattaaaatattaccaaatcatactgtaagcaatcatacagtacaagattccttgcaaacaaccctaaccaaacttctagtaaaaccattattttttctgtagtaccaactttttgcaaccactatatactccagtaaaaaccagaagtattgttgcaatgactttgccgataaattatagaacgcggctactcgaagcagtagatttaagacaatttttactgcataataactacgcatggtgtcaagatccctaaaaattaacagaggcagacccagctcaagtattgacaaactcaagtggcaactggcatatgaacaattttctcgttcaaatatatctgaagcaatgtgtaaaacaaattagttttgctccacacatctgacaataatttttttcagtaagcagacttactgtggattcatatttgcgttgttgatagcgtttgatataatctgcctcgctagtcatgacgggagcgttgccggtacc

SEQ ID NO: 385 - DNA, 3720 bp, Arabidopsis thaliana
  source 1..3720: mol_type = genomic DNA
atggattcttcatgtttcttggtttatagaatattcagatttcgtaaaagaaataagaatatttcttcttctctatcttcttcatctcccccttcttctttgtctcaaaattggttgcaccctgttttcttgagcttccgtggggaagatgtccgcaaaggcttgctcagtcacattcagaaggagtttcaaagaaacggaatcacaccgttcattgataatgagatgaagagaggaggatccattggtcctgagctcttacaggctattagaggatctaagatcgcgatcatcttgctttcgaggaactatggttcttcgaagtggtgtcttgatgaattggtggagattatgaaatgcagagaagagttgggtcaaacagtgatgaccgttttttatgatgtggatccatctgatgtgaggaagcagaagggagattttgggaaggtttttaaaaaaacttgtgttggaagaccagaggagatggtacagagatggaagcaagctttgaccagcgctgcaaatatactcggggaggattctcgcaactgggaaaacgaagcggatatgatcattaaaatctcaaaagatgtctccgatgtgttgagttttacgccatcaaaggattttgatgagtttgttggcattgaagctcatacgacggagataacttcgttgttacaacttgatctggaagaagtgagaatgatagggatttggggtcctgctggtattggcaagacgaccatctccagagttctatataacaaactctttcatcagttccaactgggcgcaatcattgacaacatcaaagtacgttatccaagaccttgtcacgatgagtacagtgcaaagctgcagttacagaaagaattgttgtctcagatgattaaccagaaagatatggtggttcctcatttaggtgttgcccaagagaggttgaaggacaagaaagttcttctagttcttgatgacgtcgatgggttagtacaacttgatgccatggcgaaagatgtacaatggtttggccttggaagtcgcattattgtcgtaactcaagatctaaaacttttaaaagctcatgggatcaagtatatttacaaagttgattttccaacttctgatgaggctcttgaaatcttctgcatgtatgcttttggtgagaagtcccctaaagttggttttgagcagattgctcggacggttacaacacttgctggtaaactcccgttaggactaagggttatgggatcatatttacggcgaatgtcgaagcaggagtgggcgaaatcaataccaaggctaaggaccagccttgacgatgatattgagagcgttttgaagttcagttacaactccttagctgaacaagagaaagatttatttcttcacataacctgttttttcagaagggaaaggattgagacattggaagtatttcttgcaaagaagtctgtagatatgaggcaagggctccaaatcttggcagataaatctctcttatctttgaacttgggaaatatagagatgcataatttgctagtacaactaggcctagacattgttcgtaagcaatctattcataagcctgggaaacgtcagttcttggttgatactgaagatatttgtgaagtactcactgatgatacgggtaccagaactcttataggcatagatcttgagttatctggtgtaatcgagggcgtaataaatattagtgaaagagcctttgaaagaatgtgcaatctccagttcttaagattccaccatccatatggtgatcgttgtcacgacatattgtacttaccgcaaggtttgagccatatatctcgaaaacttagactacttcattgggaacgttatccactgacatgtttgcctcccaagtttaatccggagttccttgtcaaaataaacatgcgagacagcatgctcgagaagctgtgggacggaaatgaacccattagaaacctcaaatggatggatttgagtttttgtgtaaacctgaaggagcttcctgatttctctactgccactaatctccaagaattgagactcataaattgtttaagcttggtggagcttccctcttccattgggaatgccactaatttactggaattggatcttattgattgctcaagtctggtgaaactcccctcctctattgggaatctcacaaatctaaaaaagttgtttctcaatagatgttcgagtttggtgaaactcccttcctcttttgggaatgtcactagtctcaaggagttaaatctcagtggttgttcaagtcttctggagatcccctcttccatcgggaatattgttaacctcaagaaagtatatgctgatggatgttcaagtctggtgcaactcccttcctctattggaaataacactaatctcaaggaattgcatctactgaattgctcgagtttgatggaatgcccttcttctatgttaaatttaactcgtctcgaagatttgaatctcagtggatgcttaagtctggtgaagctcccctctattgggaatgttattaatctccaatcattgtatctcagtgattgctcaagtctaatggaactccccttcactattgagaatgccactaatctcgatacattgtatcttgatggatgctcgaatctactggagcttccctcatctatttggaatatcactaatctccaatcattgtatctaaacggatgctcaagtctaaaggagctcccttccttggttgagaatgccattaatcttcaaagtttgtctcttatgaaatgttcaagtttggtagagctcccttcctccatctggagaatcagtaatctctcatacttagatgtcagtaactgctctagtttgctagagctcaatcttgtctcgcaccccgtggttccagattccctaatcctagatgcaggagattgtgagtctctggtgcagagactagattgcttctttcaaaatccaaagattgttctcaacttcgctaactgcttcaaactgaatcaagaagcaagagatctcatcatccagacatcggcttgtagaaatgcgatattaccaggtgaaaaagtgcctgcatacttcacgtaccgcgctactggtgattctttaacagtgaagttgaaccagaagtatcttcttcaatctttgagatttaaagcttgccttttgctagttgagggtcaaaacaaatggccaaattgggggatgaatctagtaacttctcgagaaccagatggacacattgttctgtacacaccaagcagccatcttcaaggtccacttttaatggagaatctgtatacattcgaatttgaactagtggtgacttccagtgagttcgttttggagttcagagctgatcgttacaagtgtgcggtaagcgaatgcggcctaatccaactcttttaaatccctttatgtccatgagcttcagaggtcagtggaggctgttattttgcagtctttgagatttgagacaaacactagactgaagttagggcatgacaagagctgaaatacattaatgctatatgatgaaacattttcttttaaagttgggtcgatttgacaagtttggtgtgcatgttgtgtggtgtcacttagtatgattatcattactatatatgtgatgttggtaatatgtataatttatcaattaagtcacagtatacatctatgtgtttatatgtagatattacagcgaag

SEQ ID NO: 386 - DNA, 2845 bp, Arabidopsis thaliana
  source 1..2845: mol_type = genomic DNA
caaagacttttgaatgtctcccaccaaattctgatgaatgaatatgtggatgtggtatttcatggaccagcacaaaagagcatttcaagaagtcgtttggtagctgtaccatctaattatgttcacatgatgctgagagttgaataattcagaaagggacaaagagtgttatgattgcgttgacttggagtcatgtttcatgaaggtagtgcgtagttgactcttttctagtgtaggaggtagagatttgggagagtcactagaacacgaaatggcagaggctattgtttctgttacagtgcagaagctaggacagttgctcttggaagaaccgttgttcttatttggtataggtgaccaagtgaagcagctgcaagacgaattgaagcgtttgaattgctttttgaaagatgcagatgagaagcagcatgaaagcgagagagtgcgtaactgggttgcaggcattagagaagcttcttatgatgcagaggatatcctcgaggcatttttcctcaaagcagaatcaaggaaacaaaaagggatgaaaagggtgcttaggaggcttgcttgcatcttgaacgaagcggtttcacttcatagtgttggctcagagattagagagatcacctccaggctttctaagatagcagcaagcatgctagattttggtataaaagaatctatgggcagagaaggtttgagtttgtctgatagtctaagagaacagaggcaatcgtttccatatgttgttgagcataatcttgttgggttagagcagagtctagagaagttggtgaatgatttagtttccggaggtgagaaactaagagtcacgtccatctgcggaatgggtggtttggggaaaacaactttagccaaacagattttccatcaccataaagtgaggcgtcatttcgatagatttgcttgggtatatgtttctcaagactgtagacggagacatgtttggcaagacatttttctgaatctcagctacaaggatgaaaatcagagaatactcagcttgagggatgaacaacttggagaggagttgcatcggttcttgaaaaggaataaatgcctcattgtgcttgatgatatctggggcaaagatgcttgggattgtctgaaacacgtctttccacatgaaacaggaagcgaaataatcctcactactcggaacaaggaagtcgctttatatgctgatcccaggggtgtgcttcatgagccacaattgctaacatgtgaagagagttgggagctgttggagaaaatttcattatctggaagagaaaatatagagccaatgttggtcaagaaaatggaggagattgggaagcagatagttgtaaggtgtggaggtttacctctagctataacagttcttggaggacttctggcaacgaaaagtacatggaacgagtggcaaagagtatgcgagaacatcaaatcatatgtttcaaatggaggtagtagcaatggaagtaagaacatgctagttgcagatgttttgtgcttgagttacgagtacttgcctccccatgtaaagcaatgtttcctctactttgctcattatcctgaagactatgaggttcatgtgggaacactagttagttattgcatcgcagagggaatggttatgcctgtaaaacacacagaggctggcacgacagtggaagatgtcgggcaagattatcttgaggaattagtaaagagaagcatggttatggttgggaggagggacattgtaacttcggaagtcatgacatgccgtatgcatgacctcatgagggaggtgtgtttacagaaggcaaagcaagaaagctttgtgcaagttattgattcaagggatcaagatgaagctgaggcttttatatctctttcgaccaatacatctcgtagaatttctgtccaactacatggtggagcagaggagcaccatatcaagagtctgtcgcaggtttccttcagaaagatgaaacttcttcgagttctagatcttgagggagctcaaatcgagggagggaagttgccagacgatgtaggagatctcatccatttgaggaacctgagcgtgagattgacaaacgtgaaggaacttacatcatctattggaaacttaaagttgatgattactctagacttgttcgtgaaagggcaactgtatattccaaaccaactctgggattttcctgttggaaagtgcaatccaagggatcttttagcaatgacaagtcttagaagattgtctatcaatctttcttcgcagaacacagacttcgtggtggtgtcttcactaagtaaagtcttgaaacgtctccgtggcttgacaataaacgttccatgcgaacctatgcttccaccagtagatgtaacacagttggtctctgcatttactaatctctgtgaactggaactgttccttaaactagaaaaactcccaggagaacagagtttctcctctgatcttggtgctctacgtttgtggcaatgcggattagtggatgacccgtttatggttctcgagaagcttccaaacttgaagattctccaactgtttgaaggatcatttgtaggtagtaagctttgttgttccaagaatctagagaatctagaggagtggactgtagaagacggtgccatgatgcgtcttgtcaccgtggagctaaagtgttgtaacaaactgaagtcagttcctgaaggaacgagattcctaaaaaatctacaagaagtagagattgggaacaggacaaaggcatttaaggacaagctaatctctggtggtgaagatttctacaaggttcaacatgtgccttgtgttgtttttgagaactgtgaactttaa

SEQ ID NO: 387 - DNA, 3152 bp, Arabidopsis thaliana
  source 1..3152: mol_type = genomic DNA
agcttttttgtttgtctattagagattagtcaacgtagtgatgacatactgacatctttggattgtttcaaagtttacgtttttactatacattgactagtcttagagattttatattatgcatatagtgacatagacttttcctttcttatctattcctcttctctacctaatctgtgaatctctctctctcactctctctcttttccttgattgtgcagagatgggaggttgtttctctgtttcattgccatgtgatcaagtagtgagtcagttctctcagttgttatgtgtcaggggaagttatattcacaatctctccaagaatctggcttctctgcagaaggccatgcgaatgctcaaggctcggcaatatgatgtgataagaaggttggaaacagaagagtttacagggcgtcaacaaaggctttcccaagttcaggtatggcttactagtgtcctaatcattcaaaaccagtttaatgatctgcttcgtagtaatgaagttgagcttcaaaggttgtgtctttgtggtttctgctccaaagatttgaaattgagctatcgttatgggaaaagagttatcatgatgttgaaggaagttgagagtctcagttctcaaggattctttgatgtggtttctgaggcaactccgtttgctgatgtggatgagatcccttttcaacccacaattgttggtcaggagataatgcttgaaaaggcatggaaccgtctcatggaagatggatccgggattttgggtctgtacggtatggggggagtaggcaaaacgacactactcacgaagatcaacaataagttttctaaaatagatgacagatttgatgttgtgatatgggttgttgtgtctagaagttcaacagtccgtaagatacaaagagacatagcagaaaaggtaggccttgggggaatggagtggagcgagaaaaacgataaccagatagccgttgacatccacaatgtccttaggagacgaaagtttgttttattgttggatgacatatgggagaaagtgaatttaaaagcggttggagtcccgtatccaagcaaagataacggatgcaaggtagcattcactactcgttctcgagatgtgtgtgggcgcatgggggttgatgatccgatggaagttagctgtctacaacccgaagaatcttgggatttgtttcaaatgaaggttgggaaaaatacactgggaagtcacccagacattcccggacttgctagaaaagtcgctaggaaatgtcgtggcctaccattagcactcaatgttatcggtgaagctatggcatgcaaaagaacagtacatgaatggtgtcatgccattgacgttttaacatcatctgccatagatttttcaggtatggaagatgaaattctccatgttttgaagtatagctatgataatttaaatggggagctgatgaaatcctgcttcctctattgctctctgtttcctgaagactatcttattgataaagaggggttggtagactactggataagtgagggattcataaatgaaaaagaaggcagagagaggaatattaaccaaggttatgagataattggtacccttgtccgtgcatgtttgttgttggaggaagaaaggaacaaatcaaacgtgaaaatgcatgatgtggttcgtgagatggctctatggatatcatccgatcttgggaagcaaaaggagaaatgtattgtgcgagctggtgttgggttacgtgaagtaccaaaagtcaaggattggaacactgtgagaaagatttctttgatgaataatgagattgaagagatatttgacagtcacgagtgtgctgcacttacaactctatttctccaaaagaacgacgtggtaaagatctcggctgaattctttcgatgtatgcctcatctggtggttttagatctatcagagaatcagagtcttaatgaattaccagaagaaatatcagagctggcctctttgagatatttcaacttgtcatatacatgtatacatcaactacccgttggtttatggacattgaaaaagctaatacatctgaatctcgaacacatgagcagtcttgggagtatattagggatatcaaatttgtggaatttgaggacattgggactacgagattccagactgttgctagatatgagtttagtgaaggagctgcagctcttagaacatctagaagttataaccctagatatatcatcaagtttggttgcagagccattgttatgctctcaaaggttggtggaatgtataaaagaggtagattttaagtaccttaaggaagaatcagtgagagtattgactttgccaaccatgggtaatctccgcaagctcgggataaaaagatgtggaatgagggagataaagatagagaggacaacttcatcatcgtctcggaacaaaagtcccacaactccatgcttctcaaacctctccagagtctttatagctaaatgccatggtcttaaggatttgacgtggcttttgtttgctcctaatcttacttttcttgaagttgggttctcaaaggaagtagaggatataattagtgaagagaaagctgaggagcattcagctacgattgttccttttaggaaattggagacactacacctgtttgaattacgcgggctcaagagaatctatgcaaaggctctgcattttccgtgtctgaaagttatccacgtagaaaaatgtgaaaagctgagaaagcttccattggattctaaaagtgggatcgcgggtgaagaacttgtcatatattatggagagagagaatggatagaaagggttgaatgggaggaccaagcaactcaactccgtttcttaccttcatccaggtggcggtggagagaaacataatgaacttcactttcttctacaaacttttgttgtcatggtctaaagacatttgccggtgtgtaaatctcttccttgtctcttcttgtttgcataaccgttctcatcgttcttttggttagtgatcattggatttgtacttatctctttctctaaacgatgagtgtttgtttcggcttcatagaaacattacacagagactcatgagaaaatgaataaaaacttgcaagttcctaaccattgtaataaaataataattaac

SEQ ID NO: 388 - DNA, 1159 bp, Arabidopsis thaliana
  source 1..1159: mol_type = genomic DNA
gtttggtttaggcatctgaaatctaccgaaatgggccggtaattagctcatacccaacacgaccagaccagaccgacccgacccgacggctccagattcatccatgtttcatcttcctcatcagatctaattcaatctgcgaatttctcttaaaccctaaccctctcgctgccgtccggtggtttttccgacgacgaactatgacgattcacgctgcagtaatccagaagcttctgaacaccggagcacatctcggccgtcgtgccgccgagcaccatttcaagcaatacgcttacgggacgcgtaacggaatgacaattatcgactccgacaaaaccctaatttgcctccgtagcgccgctcatttcgtcgctaacctcgcccacatgagaggtaacatcttcttcgtcaacacgaatcctctcttcgacgaaatcattgagctcacttctcgtcggatccaaggagattcgtataatcacaaccgtgcgatgaatctgtggaagatgggagggtttttgactaacagctacagtcctaagaagtttcgatctaggcataaaaagctttgctttggtccaactactatgcctgattgtgtcgttgtgtttgattctgagaggaagagctctgtgatacttgaggcatcgaagcttcagattccggttgttgcaattgtggacccgaatgtgccattggagttctttgagaagattacgtatcctgtgccagctcgtgattcggtcaagtttgtgtatttgttctgtaatgtgatcaccaagtgctttgtggcagaacagatgaagttggggatcaaagaagggagcaatgaagatttgatgaaggatttagctgcttgattttgatatttgcaacaaaagtatgaaactttacagttgtttttctgagtctggaataattgttcttcagaattgtggttacttcaactttgaaattctgggagttttttacacatggatgattttgtttctctgatggatatttctgtataagattgttgagttctagtgttctacatcttgataactgccttgtcttttccttgcacaactcattttttggaaatgctttagacattgtatatggtaatcgttacttcacaagttttggaatgagctatttacaagtaactgtctgg

SEQ ID NO: 389 - DNA, 3126 bp, Arabidopsis thaliana
  source 1..3126: mol_type = genomic DNA
caatgataagattctaaagtagattgagacaagtttcgtagtcggcagcagtaaccaagaaaacgagtaaggttgactcttgacttgttaaaccattgacttcaatttcgataaagtctctatgtaagctcatttttctgaaacaagttttgctaaaaaaatccaaagatctgaagcttcagatccttctcggctaaggctaagtcacaaccttgtaagtttactttactttggttagatttgtttcaatgttctaggattctacatgtttcttgagaagatatggattagttaaagaataatccaatcttttggttattgagattctatagtcgttggttgattgatttttggaaagttcaatctagtgatgatacacataaccgattgaattattgcttggttatagtttaccaattagagatatttcttgaagttgcagggtctgagtaaatggtggacgctgttgtaacagtgtttttagagaaaaccttgaacatcctcgaagaaaaaggccgaaccgtatcggactaccgaaaacagttggaagatttgcaaagcgaattgaaatatatgcagtcttttctcaaggatgcagagaggcagaagagaactaatgaaacgttgcgtactcttgttgcggatttacgagaactggtttacgaagctgaggatatacttgtggattgtcagctcgcggatggtgatgatgggaacgagcaaaggtcatcaaatgcgtggctttcgcggcttcatcctgcccgggttccgttgcagtacaagaaaagcaaacgtttgcaagagatcaatgagaggataacgaaaataaagagtcaagtagagccttatttcgaattcataacgccgagtaatgttggaagagataatggaactgatcggtggagctctccggtgtatgatcatactcaggtggttggtttggaaggagataaaagaaaaatcaaggagtggctctttcgatcaaacgacagccagcttttgataatggcctttgttgggatgggagggctaggtaaaactacaatcgctcaagaagtgttcaatgacaaagagatcgaacatcgtttcgaaagaaggatatgggtgtctgtgtcccagacttttactgaagaacagatcatgagaagcatattgaggaacttgggggacgcgagtgttggagatgatattggaacattgctgagaaaaatccagcagtatcttttggggaaaaggtacttgatagttatggacgatgtatgggacaagaatttgagctggtgggacaagatctaccaaggactgcctagaggacaaggaggtagcgttatcgtgaccacaaggtcggaatctgtagcgaaaagggtgcaagcgagagacgacaagactcaccgtccagagctccttagtcctgataacagttggctgctgttttgtaatgtggcatttgcagcaaatgacggtacttgtgagcgtcccgagctagaggatgttggcaaggagattgtaacgaaatgcaaaggtttgcctttgacaatcaaagcggttggtgggttacttctgtgcaaagaccatgtctatcatgaatggagacgaattgcagagcattttcaggatgagctaagaggaaacacttctgaaactgacaatgttatgtcttctctgcagttgagctacgatgaactcccttcccaccttaagtcgtgcattctcacgctttcgctctatccagaagactgtgttataccaaaacaacaactagtacatggatggatcggagaaggttttgtcatgtggagaaacggaagatctgcaactgaatctggagaagactgcttttccgggctcacaaacaggtgtctaatagaagttgtagacaaaacctatagcggaaccatcatcacttgcaagattcatgacatggttcgtgatttggtgatcgatatagccaagaaggattcgttctctaacccggaaggcctcaactgtcgtcaccttgggattagtggaaactttgatgagaagcagatcaaagttaaccataagctgagaggcgtagtgtcaacaactaagacaggtgaagtgaacaagctcaactcagacttagctaagaaattcacagactgcaaatatcttcgggttctcgatatctcgaaatccatatttgatgctcctctgtctgagattttggatgagattgcaagccttcaacacttagcatgtcttagtttgagcaacacacatccgttgatccagtttcctcgttccatggaagatctccacaaccttcagattctagacgcaagctactgtcagaatctgaaacaacttcaaccttgcatcgtcttgttcaagaaactccttgtacttgacatgacgaactgtggatcccttgaatgcttccccaagggtatcggaagtctcgtgaagctcgaagttctgttgggatttaagccagccaggtccaacaatgggtgcaagctcagtgaagtgaaaaatctcacaaaccttcggaaacttggtctttctctgactcgtggcgatcagatagaagaggaggagcttgattctttgataaacctaagcaagctgatgtccatttcgatcaactgctatgatagctacggcgatgatctcataaccaaaatagacgcccttactcctccacaccagctccatgagctttctctacaattctatcctggaaagtcgagtccatcgtggttgagtcctcacaagcttccgatgttgaggtacatgtcaatatgttcaggtaatttggtgaaaatgcaggaaccattctggggaaacgagaatactcactggagaattgaaggtttaatgttaagttcattgtcggacctagacatggactgggaagtgctgcaacagtcaatgccgtacctgaggaccgtgaccgcaaactggtgtccagagctagagtctttcgcgattgaagatgttggctttagaggcggagtgtggatgaaaacaccattgcacagaacctgatgaaacgttttaagcaactagatcaatgtttattaaacagtgacaataagttggtgtattacatataccttgatacaatgtaatgttgctttgaccgtttggatttcatatcgc

SEQ ID NO: 390 - DNA, 1170 bp, Arabidopsis thaliana
  source 1..1170: mol_type = genomic DNA
gaaaacggcccatataaatccaccaaacgaatcttctctcttggtataaatatgctgtcttgcgttacagagaaaccctagacgtcgaagatgaagttcaacgttgcgaatccaactactggatgccagaagaagctcgagatcgacgatgaccagaaactacgtgcgttttacgacaagagaatctctcaagaagtcagtggagatgctttgggcgaggagttcaaaggatacgttttcaagatcaagggtggttgcgataagcaaggtttcccaatgaagcagggagttttgactccaggccgtgttcgccttttgcttcaccgaggaactccttgcttcagaggacatggaaggagaactggtgagaggagaagaaagtctgttcgtggttgcattgtgagccctgatctctctgttctgaaccttgtcattgtgaagaagggtgagaacgatcttcctgggcttaccgatactgagaagccaagaatgagaggaccaaagagagcctccaagatccgtaaactgtttaacctcaagaaggaagatgatgtcaggacctatgtcaacacttaccgccgcaagttcacaaacaagaagggcaaggaagttagcaaagcccctaagatccagaggcttgtgaccccattgactcttcagaggaagagagctagaattgctgacaagaagaagaaaattgctaaggctaattctgatgctgctgattaccagaagcttctcgcctcgaggttgaaggaacagcgtgacaggaggagtgagagtttggcaaagaagaggtcgagactctcttctgctgctgccaagccctctgtcacagcttaaaaaagcttgagaatcaaatcaaagatgtcacctttctagttttgttctcttttcttctccggctattaaaaagttagttcgagttcatattcagctgtttttgttccaagacatgggtacacaatcgctttgggcttgtttcatgatttatgcttttagttgaagaccattttaaactcaatttttattgcttatctttctcagtttttgatcaaagcgtttctccattgaaaaccattttaatcacctgtttcaatcatacataatgttaaacacatgtactggcgattacaataggtatatattttgactgaaatttatggagca

SEQ ID NO: 391 - DNA, 3147 bp, Arabidopsis thaliana
  source 1..3147: mol_type = genomic DNA
aatggagttgccatggaggttgaggtaatttgtagctcgaatgcatctgatcatgcagttagtatagataatctgtggatattttgcaatattcgtagggaaaaggaaccaaaaatccatcaagttgtaagtgtttagcaaatatctacaagacttcatcttttgtgctttctcttaaatgtatccgatttttttttgcatttgaaagttctacaatattattagagtagtgggaaatgtcataatcgtggaaaagtataaatattttcaataatgcatacagtaatcattgattccctttgtgtggttgaaattctattctatacatctttaaattcgatatagtaatcatttattccctatctcttcttttcatcattttgaataattgtcactcactcaatttggtttcttgttttgctctctagatctctcttttctctcttctttccatctccagcaatgggagcttgtttaacactctcgttctcttgtgatgaagttgtgaatcaaatctctcaaggtttatgcatcaacgtgggttatatttgcgagctctccaagaatgtagtggctatgaagaaagacatggaagtgctgaagaaaaagcgagatgatgtgaaaagaagggtagatatagaagagttcacaaggcgtcgtgaaaggctttctcaagtccaaggatggcttacgaatgtctcgaccgtcgagaataaattcaatgaactgcttaccactaatgacgctgagcttcaaaggttgtgtctctttggattttgctctaaaaatgtgaaaatgagctatctttatgggaaaagggttgtcctgatgttgaaggagattgagagtcttagttctcaaggagattttgatactgtgactttagccactccaatagctaggattgaagagatgcctattcaacctacaatcgtaggtcaggaaacaatgctcgaaagggtatggacccgtctcacagaagacggagacgagattgtgggtctttatggcatgggtggagtaggcaaaaccacccttctcacacgaatcaacaacaagttttctgaaaaatgtagcgggtttggggttgtgatatgggtggtggtgtctaagagtccagatatccataggattcaaggagacatcgggaagagactagaccttggaggcgaagagtgggataatgtaaatgaaaaccagagagcccttgacatatacaatgtccttgggaaacaaaaatttgtgttgttgttggatgatatatgggagaaagtgaatttagaagtgcttggagtcccttatccaagcagacaaaatggatgcaaagtagtattcaccactcgttctagagatgtttgtgggcgtatgcgggttgatgacccgatggaagtcagttgcctagaacccaacgaagcctgggaattgttccaaatgaaagttggagaaaacacattgaaaggccatccagacattcctgaacttgcaagaaaagttgctggaaaatgttgtggcctaccattggcacttaatgtcattggcgagaccatggcatgcaaaaggatggtacaagaatggcgtaacgcaattgacgttttgagctcatatgctgcagaattccctggtatggaacaaattcttcctattctaaagtatagctatgataatttaaacaaggagcaggtgaaaccatgtttcctatattgctctctgtttcctgaagattatcgtatggaaaaagagaggttgatagactattggatatgtgagggattcatagatgaaaatgaaagtagagaaagagcattaagccaaggttatgagatcattggtatccttgtccgagcatgtttgttgttggaggaagctatcaataaagaacaagttaaaatgcatgatgtggttcgggagatggctctatggattgcatctgatcttggggaacataaagaaagatgtattgtgcaagtcggtgttggattacgtgaggtaccgaaagtcaagaactggagttctgtgagaaggatgtcgctgatggaaaatgagattgaaattttatctggcagtcccgaatgcctggaacttacaactctgttccttcagaaaaatgattcattgctacatatctcggatgaattcttccggtgtatcccaatgctagttgttttggatctatcagggaattcaagtctccggaaattgcctaaccaaatatcaaagttagtctccttgcgttatcttgacttgtcgtggacatacattaagcggctacctgtcggtctacaagagttgaaaaagctcagatatttgagattggattacatgaagagacttaagagtatttcagggatatcaaatatatcaagtttgaggaaattgcaacttttacagtctaaaatgtcgctagacatgagcttagtggaggagttgcagctattagaacatttagaagttctaaacataagtatcaagtcaagcttggtagtggagaagttgttaaatgctcccaggttggtgaaatgtcttcaaatcttagtacttagaggagttcaggaagaatcatccggagtattgactttgccagatatggataatctcaataaagtcatcataaggaagtgtggaatgtgtgagataaagatagagaggaaaactttatcattatcatcgaacagaagtcccaaaactcaattcctccataacctctccactgtgcatataagtagctgtgatggtctgaaggatttgacgtggttgttgttcgctcctaacctcactagtctcgaggttctggactcggaactagtagaaggaataataaaccaagagaaagctatgactatgagtggtatcattcctttccagaaactagagagtctacgcctacacaatctagcgatgttgaggagcatctactggcaacctctgtcttttccatgtctgaagacaattcacataacgaagtgtcctgagctgagaaagcttccattggattctgaaattgccataagggatgaagaacttgtcattaagtaccaagaggaagaatggcttgaaagggttgaatgggacaacgaagccacaagactccgtttcttaccttttttcaagttctttggacctgaatggcaagttagttatgtgcggtag

SEQ ID NO: 392 - DNA, 3034 bp, Arabidopsis thaliana
  source 1..3034: mol_type = genomic DNA
caaaaaaacaaagaaggattataagctatacttacttttcagcttctctcatggaagaatcttcatctttgtcattgcagtcttgcaattggagacaccatgtgtttccaagcttcagcggcaaagatgtccgcagaacctttctcagccaccttctcaaggagttccggcgtaagggaatccgtactttcatagataatgatatcaagagaagccaaatgatcagttctgagcttgtacgagctatcagagaatctaggattgcggttgtagtgttgtcgcggacctatgcatcttcaagctggtgtttgaatgagttggtggagataaagaaagtaagccagatgatcatgccggttttctacgaggtggatccatctgatgtgaggaaacgaacgggagaatttggaaaggcgtttgaggaagcatgtgaaagacaaccagatgaggaagtgaagcagaaatggagagaagcattggtctatatagctaatatagccggcgagtcttctcaaaactgggacaatgaagcagatctgattgacaagattgctatgagcatttcatatgaattgaattctacattatcacgagattcctacaatctggttggaatcgacaatcatatgagagagctggattctttgttatgtctggaatcaactgaagtgaaaatggtggggatttggggtcctgcaggtattggcaagacaacaattgccagagctttattcaaccggctatctgaaaacttccaacacactatttttatggagaatgttaagggaagttctaggacctcggagctcgatgcctatggcttccagttgcgtttgcaagaacagtttctgtctgaagttattgatcataagcatatgaagatacatgatttaggtttggtaaaagaaagattgcaggatctgaaagttcttgttgttcttgatgatgttgataaactagaacaacttgatgccttagtgaaacaatctcagtggtttggttctggaagtaggatcattgtgaccacggaaaacaaacagctattgagagcgcatgggatcacttgcatatatgagttgggttttccatctagaagtgattctcttcagattttctgccaatatgcatttggagagagttctgcaccagatggttgtatcgagcttgctactgaaataacaaagcttgctggctatcttcccctagctctaaaggttttggggtcctctctgcgagggatgagcaaagatgagcaaaaatcagcattgcctcgactcagaaccagtcttaatgaggatattagaaatgttttacgagtcggttatgatggtatacatgacaaggataaggtcatattccttcatattgcttgtttattcaatggtgagaacgttgattatgtgaagcaaatacttgcaagttctggcttggatgtcacatttgggcttcaagtccttaccagtaggtctctcatacacatatcgagatgcaatcgtactattacgatgcacaatttgctagaacaattgggtcgagaaattgtttgcgaacaatctattgccgagcctggcaaacgtcaattcttgatggatgcttcagagatttatgatgtacttgctgataacactggtactggagctgttttgggcatatctttggacatatctaagatcaatgagttgtttctgaatgaaagagcttttggtgggatgcataatctgttgtttctaagattctacaagtcctcttcgagtaaagatcaacctgagcttcatttacctcgaggcttggattatttaccccgtaaacttaggctgctgcattgggatgcattccccatgacatcaatgcctctgagtttttgtccacagtttcttgttgtgataaacataagggagagccagcttgagaagctgtgggaaggaacacaacctcttagaagtctaaagcagatggatttaagtaagtctgagaatctaaaagagattcctgatctttcgaaagcggtaaatatcgaggaactctgtctcagttattgtggaagtttggtgatgttaccttcctcgatcaagaacctcaacaaattggttgttcttgacatgaagtattgctcaaagctagagattatcccctgcaatatggacttagagtcccttagcatcctcaatcttgatggatgctcacgattggagagttttccagaaatttcttcgaagattggatttctctctctgtcagaaactgcaatagaagaaattcccacaacagtcgcgtcttggccatgtctggcagcattggacatgtcaggctgcaagaacctcaagacgtttccatgtcttccaaaaactatagaatggttggatttgagcaggacagagatcgaagaagttcctttgtggatcgataaactctcaaagctcaataaactattgatgaacagctgcatgaagctaagaagcatctcttctgggatctctacgctggaacatatcaaaacactagattttttggggtgcaagaatattgtgagctttcctgtagagatattcgagagctctcggttctgtcataatctggtgatggagatgagaaacattcaaaaccctgatcttcctcgaccattttatttcaagaacaactatattgacactattccagattgtattacacgtcactgcaagctgccttttctgaattcatcaggatcaatctccagcaagatagagaatgatttcatctggttcgataaataaatatcagtgaagaattgcatgataatgatgagtcagatggagtttcatcttcaaaccctgctcattacaattgtaagtgacatcatttgacttttcccctgtggacccatctttgggcactgcaagtgttccagaccatatagttcaacatctctgaaactgagaatgaaatccgtgtacgttgggcacgttattattgttgaaatgtaggttcttgtaagatatagcttatagacaattgtttgtatatccgtgtacgttgggcacgttattattgttga

SEQ ID NO: 393 - DNA, 3099 bp, Capsicum chacoense
  source 1..3099: mol_type = genomic DNA
caaatatttcttggagtgaatttgaagttgtattatctgcaattgaatggttggtcatagtcgcaaaggacaaaaacgagaatacagtatatatggctcatgcaagtgtggcttctcttatgagaacaatagaatctctcttgacattcaattcgccgatgcaatctctatcctgtgatcacagagaagaactttgcgctcttcgtgaaaaagttagttccctggaagtatttgtcaagaactttgagaaaaacaatgtttttggggaaatgacggattttgaagtagaggtaagagaagttgcaagtgctgctgaatacacaattcaactgagactaacaggaactgtactgggagaaaataaaagccagaaaaaaaaggcgcgtcgaaggtttcgtcaaagcctgcaacaagtagcagaggacatggatcatatctggaaagagtcgacaaagatccaagataaaggaaaacaagtatcaaaggaatcattggttcatgatttttcaagttcaacaaacgatattttgaaggttaagaacaatatggttggacgtgatgatcaaaggaaacagttgttagaagatctgactagaagctactctggggaacccaaagtcatcccgattgtcgggatgggaggcataggtaaaacaaccttagcaaaagaagtttacaatgatgaatcaattctatgccgttttgatgttcatgcctgggctaccatatctcaacagcacaacaaaaaggaaattttgctgggccttctgcattccacaatcaaaatggatgacagggttaagatgattggtgaagcagagctagcagacatgttacagaaaagtttaaagagaaagaggtacttaattgtcttggatgatatctggagttgtgaagtgtgggatggcgtgagacgatgctttccaactgaagacaatgcagggagtcgaatactgttgactacccgtaatgatgaagtagcttgttatgctggtgtagagaatttttctttgcggatgagcttcatggatcaagatgagagttggagtcttttcaaaagtgcagcattttcaagtgaagcattaccatatgagttcgagactgttggaaagcaaatcgcagatgaatgtcacgggttaccactaactattgtcgtggttgcagggcttctcaaatctaaaaggacaatagaagattggaaaactgttgctaaagatgtcaagtcattcgtcacaaatgatcctgatgaacgatgttcacgtgtgcttgggttgagttacgatcacttgacaagcgatctaaaaacatgtcttctgcatttcggaatttttccagaagacagtgatattccagtgaagaatttgatgagatcatggatggctgaggggttcctgaagttggaaaatgatttggaaggagaggttgagaagtgtttgcaagagcttgtcgatagatgtctagtcctcgtcagcaagagaagtcgagatggaacaaaaattagatcatgtaaggttcatgatctaatatatgacctgtgcgtgagagaagttcaaagggagaacatttttatcatgaacgacattgttcttgacgtatcatatccagaatgttcatatctctgtatgtataaaatgcagccctttaagcgcgtgactggtgatgaaattaattattgtccctatggtctttatagggctcttcttacccctgtaaatcgtcagttgagagatcatgacaacaacaatcttttgaaacgaacccattctgttttctcttttcatcttgagcctttatattatgttctcaaatcagaggttgttcatttcaaattactcaaagtcttggagctgagacacagacagattgatggtttccctcgagagatactaagcctcatctggttgaggtacctatcattgttcagctatgggaatttcgatgtacctccagaaatttgcaggttatggaatctgcagacattcattgttcaacggtttcgatcagatataataatttttgctgaggaaatttgggaactaatgcaattaaggcatcttaaactgcccagattttatttgccagattgcccaagtggatctgttgacaaaggaaggcacttggatttttcaaacttacaaactatttcttacttgtctccacgttgttgcacgaaggaggttattatggggattcagaatgtcaaaaaattaggaatcagtggaaataaggatgactataaaagttttcgggactctgggcttcccaacaatcttgtctatctgcagcaacttgaaatattgagtcttatatctgttgattatagccttttgccagtgatcatttcaagtgcaaaagcttttccagcaacgctcaagaagttgaagttggaaagaacttatctaagctggtcatacttggacatcatagctgagttgcctaaccttgaggtgctgaagctgatggatgacgcttgttgtggtgaagaatggcatccaattgttatgggatttaatcgattgaagcttttgctaattaaatatagttttctcaagttctggaaagccacaaatgacaattttcctgtccttgagcgcctcatgattagaagttgcaaaaatttgaaagagatacccattgagtttgcagatatacacacactacagctgattgagttaagagagtgtcctcccaaacttggggaatctgctgcacgaattcagaaagaacaagaagacctcggaaacaaccctgtggatgttcgtatctcaaatccattgaaggagagtgattctgattcagaagaacattaggaaaggatctcaaggccagaaggattgaactcttgggatttcatttcggccctctatcacaaaataccactaaattatcggtttcaagcaatgtgtgacttccaaggagatgtgatatcttttgtgttgtaacatatttttgagttgtactgattcccttcttcccttctctttttatgtaactttactaattcaacttcaagtactagcagaccacatggttgattgtgatcgagtttgatgattattttatacgatgagacaaccagtttagttttaaaaaaaaaaa

SEQ ID NO: 394 - DNA, 4010 bp, Glycine max
  source 1..4010: mol_type = genomic DNA
aatacagctgttaaagtttgtcttgttgggaacactcaacagttattggttgactcaatcttaattaaagccatccttcataaaattgcctatcactgatttgatcagttcatgaaccctgcactgcacttcaaattactcattttcattcatccactcaactccctttcctaccatggcactagaattggttggtggtgctcttctttctgctttccttcaggttgcgtttgagaagcttgcttctcctcaagttctggacttctttcgtggaagaaagcttgatcaaaagctgctcaacaacttggaaatcaagctgaactccatacaggctctggctaatgatgcagaactaaagcagttcagagatccacttgtcagaaactggcttcttaaggtcaaagatgctgtgtttgacgcagaggatatcttggatgaaatacaacatgagatctccaaatgccaggtcgaagctgaagctgaagctgagtctcaaacctgcacttgcaaggtaccaaatttcttcaaatcttctcctgctagttcctttaacagggaaattaaatccaggatggaagaaatccttgatagattagatcttctctcaagccaaaaggatgatctaggcttgaaaaattctagtggtgttggcgttggatcagaattgggtagtgcagtaccacagatatcacaatcaacatcttcagttgttgaaagtgatatttatggcagagataaagacaaaaaaatgatttttgattggctgacatctgacaatggcaatcctaaccagccatcgatactttctattgtgggcatgggtgggatgggtaagaccacacttgctcaacatgtattcaatgaccctaggatcgaggaggctagatttgatgtcaaagcttgggtctgtgtttcagatgattttgatgctttcagggtaacaagaacaattcttgaggccatcactaaatcgactgatgatagtagagacctagagatggttcacggaagattgaaagaaaaattgacggggaagagatttcttcttgttttggatgacgtttggaacgaaaaccgacttaaatgggaagctgtgctaaaacatcttggttttggggctcaggggagtagaattattgccaccacacgtagtaaggaagttgcttctaccatgaggtcaaaagaacacctcctggagcaattacaagaagatcattgctggaagttgtttgctaaacatgcattccaagatgataatattcaaccaaatccagattgcaaggagattggtatgaagatagttgaaaaatgtaaaggacttcctctggccttgaaaacaatgggaagtctattacacaacaagtcatctgttacggaatggaaaagcatattgcagagcgagatatgggaattttcaacagagcgtagtgatattgtacctgctttagcactaagctatcaccatcttccttctcatctcaagagatgttttgcttattgtgccttattccccaaagattatgagtttgataaggagtgcttaatacaattgtggatggctgaaaaatttctacaatgttctcaacagggtaagagtccaggagaagttggtgaacaatacttcaatgatctattatcaaggtgcttctttcaacaatcaagcaacacagagagaacagattttgtcatgcatgaccttctcaacgatttggcaagatttatttgtggggacatttgtttcagattggatgggaatcaaacaaaaggtacaccaaaagcaacccgtcattttttaattgacgttaaatgttttgatgggtttggaactctatgtgacacaaaaaagttacgtacttatatgccaacaagttacaaatattgggattgcgagatgtcaatacacgaattgttctccaagtttaattacttacgtgtcttatctctgtttgattgtcatgacctaagagaggtgcctgactctgtgggtaatctcaaatatctccgttcgttagacttatccaatactaaaatagaaaaactacctgaatcaatatgttcactctacaacttgcaaatactgaagctaaatggttgtagacatttgaaggagctgccctcaaatttgcataaactcactgatttgcatcggcttgaattaatagaaactggagtgagaaaggtaccagcacatttgggaaaactggagtatcttcaagtattaatgagttcgtttaatgttggcaaaagtagggagttcagtatccagcagttaggagaactcaatcttcatggaagtctatcaataaggcaactgcagaatgttgagaatccatcagatgcattagcggtggatttaaaaaataaaacacaccttgtcgaggtagagttagaatgggattcagactggaaccctgatgattcaacaaaagaaagggatgtaatcgagaatctacagccttccaaacacttggagaagttgaggatgaggaactatgggggtactcaatttccaaggtggttattcaacaattcatcatgtagtgtggtgtccttaaccttgaagaactgtaaatattgcctatgtttgcctccccttggacttttgccatctctgaaggaactttcaattaaagggcttgatgggatcgtgagtatcaatgctgattttttcgggagtagctcttgttcatttacatccttgaaatctttggagttctaccatatgaaggaatgggaagaatgggaatgtaaaggtgtgacaggtgcttttccacgtcttcaacgtctttctatagagcgttgtcccaagctgaaagggcacttgccagagcaactatgtcatttaaattctctaaagatttctgggtgtgaacaacttgtaccttctgctctcagtgcccctgatattcataaattatacctaggagactgtggagagctgcaaattgatcatgggacaactttgaaagagcttaccattgaaggtcacaacgtggaggcagccttattcgaagagattgggcgcaattactcttgttcaaataacaatattcccatgcacagttgctatgatttccttgtaagcttgcgcatcaaaggtggctgcgactctttaacgacctttccgctagatatgttcacaatactcagggaactttgtatctggaagtgtcctaatctacggaggatttcacaagggcaggctcataatcatctccagactctggatatcaaagagtgcccccaattagaatcattgcctgaaggaatgcatgtcctccttccatctcttgattctctgtgcatagatgattgtccaaaagttgaaatgtttcccgaaggaggtttgccatcaaatttaaaagaaatgggtctctttggtggtagttacaaacttatctccttattgaaaagtgccttgggaggcaatcactctctagaacggttagttattggaaaagtggattttgagtgtcttcctgaggaaggtgtactgccacactctcttgtttctctacagatcaatagctgtggagatcttaaaagactggactacaaaggtatctgccacctctcctctctcaaggaattgagtcttgaagactgccccaggctccaatgcttaccagaggagggtctgcccaaatccatttcaactttgtggatttggggggactgtcagttgctcaaacaacgttgccgggaacccgaaggcgaagactggccaaagattgctcacttttgcccgttgctcaatcaacgttgccgggaacccggaggcgaagactggccaaagattgctgacattgaaaacgtgtatataaggtagtgaggttgattataaagaataatggtgaaagatgtagatgcttctctattgcctgcaatttactaaataattgttttctaaacttatttttgctttctgcttgctggacgccgccgctcagttatttattattcgacaaaataattgtttaatatagtttcaagtgattgattctgcttgg

SEQ ID NO: 395 - DNA, 3639 bp, Glycine max
  source 1..3639: mol_type = genomic DNA
atggcagtagaattaattgctggtgctcttctttcttctttccttcaggttgcattcgaaaagcttgcttctcctcaagttctccacttctttcacggaaaaaaacttgatgagacgcttctgagaaagttgaaaattaagctgctgtccatcgatgctctggctgatgatgctgaacgaaagcagttcgcagatccacgcgtgagaaactggcttcttgaggtcaaagatatggtttttgatgcagaggatctcttggatgaaatgcaatatgaattctccaaatgggaactggaagctgaatctgaatctcagacctgtaccggctgtacttgcaaggtaccaaatttcttcaaatcttctcctgctagttcctttaacagggaaattaaatccaggatggaaaaaatccttgatagcttagaatttctctcaagccaaaaggatgatctaggattgaaaaatgctagtggtgttggcgttggatcagaattgggtagtgcagtaccacagatatcacaatcaacatcttcggtggttgaaagtgatatttatggcagagataaagacaaaaaaatgatttttgattggctgacatctgacaatggcaatcctaaccagccatcgatactttctattgtgggcatgggtgggatgggtaagaccacacttgctcaacatgtattcaatgaccctaggatccaggaggctagatttgatgtcaaagcttgggtctgtgtttcagatgattttgatgctttcagggtaacaagaacaattcttgaggccatcactaaatcgactgatgatagtagagacctagagatggttcacggaagattgaaagaaaaattgacggggaagagatttcttcttgttttggataacgtttggaacgaaaaccgacttaaatgggaagctgtgctaaaacatcttgtttttggggctcaggggagtagaattattgccaccacacgtagtaaggaagttgcttctaccatgaggtcaagagaacacctcctggagcaattacaagaagatcattgctggaagttgtttgctaaacatgcattccaagatgataatattcaaccaaatccagattgcaaggagattggtacgaagatagttgaaaaatgtaaaggacttcctctggccttgaaaacaatgggaagtctattacacgacaagtcatctgttacggaatggaaaagcatattgcagagcgagatatgggaattttcaacagagcgtagtgatattgtacctgctttagcactaagctatcaccatcttccttctcatctcaagagatgttttgcttattgtgccttattccccaaagattatgtgtttgataaggagtgcttaatacaattgtggatggctgaaaaatttctacaatgttctcaacagggtaagagtccagaagaagttggtgaacaatacttcaatgatctattatcaaggtgcttctttcaacaatcaagcaacacaaagagaacacattttgtcatgcatgaccttctcaacgatttggcaagatttatttgtggggacatttgtttcagattggatggtgatcaaacaaaaggtacaccaaaagcaccccgtcacttttcagttgcaatcgaacacgttcgatactttgatgggtttggaactctatgtgatgcaaaaaagttacgttcatatatgccaacaagtaacaaaaagatttttgattacttctcttcttgggatcgcaatatgtcgatacatgaactggtctccaagtttaagttcttacgtgtcttatctttatctcattgttctaacctaagcgaggtgcctgactctgtgggtaatcttaaatatctcagttcgttagacttatccaatactgaaatagtaaaactacctgaatcaatatgttcactctacaacttgcaaatactgaagctgaattattgtaaacaattggacgagctgccctcaaatttgcataaactcactgatttgcatcgccttgaattaatagatactggagtgagaaaggtaccagcacatttgggaaaactgaagtatcttcaggtatcaatgagtccgtttaaggttggcaaaagtagggagttcagtatccagcagctaggagaactcaatcttcatggaagtctatcaattcagaacctgcagaatgtcgagagtccctcggatgcattagcagtggatttgaaaaataaaacacaccttctggaggtagagttagaatgggattcagactggaaccctgatgattcaacaaaagaaagggatgaaattgtaatcgagaatctacagcctcccaaacacttggagaagttgaggatgaggaactatgggggtaaacaatttccaaggtggttattaaacaattcattattgaatgtggtgtccttaaccttggagaactgtcaatcttgccaacgtttgcctccccttggacttttgccatttctgaaggagctctcaattcaagggcttgcagggattgtgagtattaatgctgattttttcgggagtagctcttgttcatttacgtccttggaatctttgatgttccacagtatgaaggaatgggaagaatgggaatgtaaaggtgtgacaggtgcttttccacgtcttcaacgtctttctatagagtattgtcccaagctgaaggggcacttgccagagcaactatgtcatttaaatgatctaaagatttatgggtgcgaacaacttgtaccttctgctctcagtgcccctgatattcatcaattatccctaggagactgtggaaagctgcaaattgctcatccgacaactttgaaagagcttaccattacaggtcacaacgtggaggcagccttactcgaacagattggacgcagttactcttgttcaaataacaatattcccatgcacagttgctatgatttccttgtaaggttggtcatcaatggtggctgcgactctctaacgaccattccactagatatgttcccaaaactcagggggcttgatatcgggaagtgtcctaacctacagaggatttcacaggggcaggctcataatcatctccagagtctgtatatcaaagagtgcccccaattagaatcattgcctgaaggaatgcatgtcctccttccatctcttcattatctgagcataagggattgtccaaaagttgaaatgtttcccgaaggaggtttgccatcaaatttaaaaggtatgagactccatggtagttacaaacttatgtcctcattgaaaagtgccttgggaggcaatcactctctaattagcttatatattggaggagtggatgttgagtgtcttcctgacgaaggtgtactgccacactctcttgtttctctatggatcagtgactgtgaagatcttaagagactggactacaaaggtctctgccacctctcctctctcaagaacttgtttctttatgactgccccaggctccaatgcttaccagaggagggtctgcccgaatccatgttatctttgcacatttacgattgtccgttgctcatacaacgttgccgggaacccgaaggcgaagactggccaaagattgctcacattgattataaagaatttaatggtgaggttgattataaataa

SEQ ID NO: 396 - DNA, 3306 bp, Hordeum vulgare
  source 1..3306: mol_type = genomic DNA
atggtgagcgccttggcaggggtgatgacctctgtcatcggcaagctcaccgccctgctcggggaggagtacgcaaagctgaaaggtgtgcacagggaggtggagttcatgaaagatgagctgagcagcatgaacgcgctccttcagaggctggcagaggcggaccgtgatcttgatgtgcagacgaaggaatggagggaccaagttcgggagatgtcttacgacattgaggattgcatagacgactttatgaaaagccttggccaaactgacagtgctcagacagcagggcttgtgcaaagtgtggtccagcagctcaaggcgctgagggcgcgccatcaaatatccagcaaaatccaggggctcaaggcacgtgttgaagatgcaagcaagcgacgtatgaggtataagcttgatgagcgcaccttcgagcctagcatctcaagggctatcgaccctcgtttgccttcactctatgctgagcctgatgggcttgtcggtattgacaagccaagagacgagctcattaagtgcctaatggaggggatgggtgcatcagtgcagcagcaaaaggtgttatctattgtgggtcctgggggtctcggtaaaactacacttgccaatgaggtgtaccgtaaactggaaggccagttccagtgtcgagcttttgtttccttgtcacaacaaccagatgtgaataagatcttaagaaatatactctctcaagtctgccagcaagagcttcctagcacaagtgtacaggacgagggaaaactcattgacgcaatcagagaagttttaaagaacaagaggtacattcaccaactttgaattagttggctgttggtactgcatcattttttcttcagcattgatgcttatttagtagcctagccattctactatagtctactgttgtttaattaaattaaatatagatgattttgtttcattttaagcatatatatgcaattgtgaatagtgctttgattcacagttcatgaggttatctatctaaagggctcaaaagacttcctttaaatatcgtaaccccctatgataaattcaactttttgtggtgtggccaaaccattggggaaggggataatggctgtctgtaatagtaatatatagaagagaaatgattctgtccccataaacagtgaatttcaagaaacctgaagccctatatcattctcatgatttactaacatttgacgacaaggaaacatgccattttatttatttgttcacatattttccttattcatgagatttgcaaaacatgcactttgcaggtacttagttgttattgatgatatatggagtactcaagcatggaagattatcaaatgttctttgtttctgaatgacctgggaagcagaataatgacgacaacacgtagtattgatatagccaagtcatgttgctctcggcgccatgatcgtgtctatgaaataatgcctctgacgacagccaactctaagggtttattttttaaacgaatatttggctcagaagatatatgtcctcctcaattggaagaaatctcctcggaaatattaaaaaaatgtggtggttcaccattagcgattcttacaatagcaagtttattggccaataaagatagcacaaatgaagaatggaagtgggtgtataattcgatcggttcgacactgggaaaggaccccggtgtagaagagatgagaaggatactatctcttagctacgatgatcttcctcaccatttgaagacatgtttattgtatctgagtatatttccggaggactatgagattgagagggatcgattgataaggaggtggatcgctgaaggattcattgatacagatggtggacgagatttggaggaaataggagagtgttattttaatgatcttatcaatagaagtatgcttgagccagtgaaaatccaatatgacggtcaagtcgtttcatgccgagtgcatgatatgattctggatctccttgcatctaagtcaattgaagaaaactttgccaccttctctggtaaccaaaatgagatattagtccttcggcataagatccgtaggctatctctcaattattatgccctagagcacaccatgcttccatcaacagcgatcatttctcattgccgttcgctcagtattgtcgggtatgctgaaaagatgccttctctttcgaagtttcgtgttctgcgagtacttgatattgagaatggtgaggagatggagagcaactgttttgagcatctaaggacgcttttccagttgaggtatttgcgactccacgttagaagtatttctgcactccctgagcagttaggagaactacagcatttgaggactctggatatgggctggacaaagatcacaaaaatgcccaaaagcattgttcagctgcaacatttgacatgtttgcgcgtcagtaatttggaattacctgaagggattgggaatctgcaagctctgcaggagctatcagatatcaaagtcaaccggcacagcacggcgtcttgtttgctggagctgggcagtctgaccaaactgaaaatccttgggctacgctggtcaattgtcagtacacacggtaacgaagacacttttgtggataacttggtatcctcgctgcgcaaactgggcagatccagccttcgatccatatgcattcgtagttatcatggctataccatggagttcttactggactcctggttcccctcccctcatctcatgcaaaagtttcagatgggcacgtactacaacttccccagagttcctccttggatcgcgtcgctggacaagctcacatacctagatatcaatatcgatccagtagaagaggaagcactggagatccttggagaattgccttctttgctgtttctctggctgacatcgaaatcggctgctcccaaacagcggctcgtcgtaagcagcagcatgtttgtgcgtctgaaggagctccacttcacctgctggagcaatgggcaaggactgatgtttgaggccggggccatgccgaggctcgagaagctgtgggttccgtttgacgcaggcagcggtcttgattttggcatccagcacctctcttccctcacgcatcttgccgtcgagatcatttgcgtcggcgcgaccgctcgggacgtagaggcgttggaggaggccatcagaggtgcagcccgtctccttccgaaccgccctgcggtggaattccgaacatgggatgatgaaaagatggtggtggaggaggaggaggggcaaggcgtccctgaagaggagatccacgctagcggttga

SEQ ID NO: 397 - DNA, 3306 bp, Hordeum vulgare
  source 1..3306: mol_type = genomic DNA
atggtgagcgccttggcaggggtgatgacctctgtcatcggcaagctcaccgccctgctcggggaggagtacgcaaagctgaaaggtgtgcacagggaggtggagttcatgaaagatgagctgagcagcatgaacgcgctccttcagaggctggcagaggcggaccgtgatcttgatgtgcagacgaaggaatggagggaccaagttcgggagatgtcttacgacattgaggattgcatggacgactttatgaaaagccttggccaaactgacagtgctcagacagcagggcttgtgcaaagtgtggtccagcagctcaaggcgctgagggcgcgccatcaaatatccagcaaaatccaggggctcaaggcacgtgttgaagatgcaagcaagcgacgtatgaggtataagcttgatgagcgcaccttcgagcctagcatctcaagggctatcaaccctcgtttgccttcactctatgctgagcctgatgggcttgtcggtattgacaagccaagagacgagctcattaagtgcctaatggaggggatgggtgcatcagtgcagcagcaaaaggtgttatctattgtgggtcctgggggtctcggtaaaactacacttgccaatgaggtgtaccgtaaactggaaggccagttccagtgtcgagcttttgtttccttgtcacaacaaccagatgtgaataagatcttaagaaatatactctctcaagtctgccagcaagagcttcctagcacaagtgtacaggacgagggaaaactcattgacgcaatcagagaagttttaaagaacaagaggtacattcaccaactttgaattagttggctgttggtactgcatcattttttcttcagcattgatgcttatttagtagcctagccattctactatagtctactgttgtttaattaaattaaatatagatgattttgtttcattttaagcatatatatgcaattgtgaatagtgctttgattcacagttcatgaggttatctatctaaagggctcaaaagacttcctttaaatatcgtaaccccctatgataaattcaaccttttgtggtgtggccaaaccattggggaaggggataatggctgtctgtaatagtaatatatagaagagaaatgattctgtccccataaacagtgaatttcaagaaacctgaagccctatatcattctcatgatttactaacatttgacgacaaggaaacatgccattttatttatttgttcacatattttccttattcatgagatttgcaaaacatgcactttgcaggtacttagttgttattgatgatatatggagtactcaagcatggaagattatcaaatgttctttgtttctgaatgacctgggaagcagaataatgacgacaacacgtagtattgatatagccaagtcatgttgctctcggcgccatgatcgtgtctatgaaataatgcctctgacgacagccaactctaagggtttattttttaaacgaatatttggctcagaagatatatgtcctcctcaattggaagaaatctcctcggaaatattaaaaaaatgtggtggttcaccattagcgattcttacaatagcaagtttattggccaataaagatagcacaaatgaagaatggaagtgggtgtataattcgatcggttcgacactgggaaaggaccccggtgtagaagagatgagaaggatactatctcttagctacgatgatcttcctcaccatttgaagacatgtttattgtatctgagtatatttccggaggactatgagattgagagggatcgattgataaggaggtggatcgctgaaggattcattgatacagatggtggacgagatttggaggaaataggagagtgttattttaatgatcttatcaatagaagtatgcttgagccagtgaaaatccaatatgacggtcaagtcgtttcatgccgagtgcatgatatgattctggatctccttgcatctaagtcaattgaagaaaactttgccaccttctctggtaaccaaaatgagatattagtccttcggcataagatccgtaggctatctctcaattattatgcccaagagcacaccatgcttccatcaacagcgatcatttctcattgccgttcgctcagtattgtcgggtatgctgaaaagatgccttctctttcgaagtttcgtgttctgcgagtacttgatattgagaatggtgaggagatggagagcaactgttttgagcatctaaggacgcttttccagttgaggtatttgcgactccacgttagaagtatttctgcactccctgagcagttaggagaactacagcatttgaggactctggatatgggctggacaaagatcacaaaaatgcccaaaagcattgttcagctgcaacatttgacatgtttgcgcgtcagtaatttggaattacctgaagggattgggaatctgcaagctctgcaggagctatcagatatcaaagtcaaccggcacagcacggcgtcttgtttgctggagctgggcagtctgaccaaactgaaaatccttgggctacgctggtcaattgtcagtacacacggtaacgaagacacttttgtggataacttggtatcctcgctgcgcaaactgggcagatccagccttcgatccatatgcattcgtagttatcatggctataccatggagttcttactggactcctggttcccctcccctcatctcatgcaaaagtttcagatgggcacatactacaacttccccagaattcctccttggatcgcgtcgctggacaagctcacatacctagatatcaatatcgatccagtagaagaggaagcactggagatccttggagaattgccttctttgctgtttctctggctgacgtcgaaatcggctgctccgaaacagcggctcgtcgtaagcagcagcatgtttgtgcgtctgaaggagctccacttcacctgctggagcaatgggcaaggactgatgtttgaggccggggccatgccaaggctcgagaagctgtgggttccgttcgacgcaggcagcggtcttgattctggcatccagcacctctcttccctcacgcatcttgccgtcgagatcatttgcgtcggcgcgactgctcgggacgtggaggcgttggaggaggccatcagaggtgcagcccgtctccttccgaaccgccctgcggtggaattccgaacatgggatgatgaaaagatggtggtggaggaggaggaggggcaaggcgtccctgaagaggagatccacgctagcggttga

SEQ ID NO: 398 - DNA, 3921 bp, Nicotiana benthamiana
  source 1..3921: mol_type = genomic DNA
atgttgacttcatcttcccatcatggacgcagttatgatgttttcctaagctttaggggagaagacactagaaaaacatttgtgggtcatctgtttaatgctcttattgaaaagggtattcacacattcatggatgataaggagttaaagagagggaagtcaatctcatctgaactcatgaaagccattggagaatcaagatttgctgttgttgtcttttccaagaactatgcttcctctacatggtgcttggaagaactggtaaagattcttgaaattcatgaaaaatttgagctaattgttgtcccagttttctatgatgtggatccatcaactgtgaggaaacaaaatggggagtatgctgtttgttttactaaatttgaagctaacttggttgatgatagagacaaagtgctaaggtggagggaagcacttactaaggtagctaacatatcagggcatgatttgcgcaacacttacaatggggatgaatcaaaatgcatacaacagatactgaaagacatattcgacaaattttgtttctctatctcaataactaacagagatttagttggaatagaatctcaaattaagaaactaagttcattgttgaggatggacctgaaaggagttcgtcttgttgggatttgggggatgggtggtgtgggaaagacaactgctgcaagagcattgtttaacagatactatcagaattttgaaagtgcttgttttctcgaagatgttaaagaatatctgcaacaccataccttgttgtatttgcagaagactctcctttccaaactgttgaaggtagaatttgtagattgtactgatactgaagaaatgtgtgtaatattaaagaggagactttgttctaagaaagttctggttgttcttgatgatgttaatcataatgaccagctggataagctggtcggagctgaagattggtttggtagtggtagtagaattgttatcacaactagggatatgaaactgttgaaaaaccatgatgtgcatgaaacgtacgagataaaggttttggaaaaagatgaagcaattgagcttttcaatttgcacgcattcaagagaagttcacctgaaaaggagtttaaggagctcttaaatcttgtggtagattatactggaggccttcctttagctcttaaggtgcttggttctctgctgtacaaggaagatcttgatgtatggataagtacgattgatagactaaaagataaccctgagggtgaaattatggctacacttaaaataagttttgatggattaagggattatgaaaaaagtatatttttagatattgcatgtttcttcaggggttacaatcaaagagatatgacagcattatttcacgcttctggtttccacccagttctaggagtaaagacccttgttgaaaaatctctcatttttattttagaggacaaaatccaaatgcatgatttgatgcaagagatgggtagacaaatcgcagttcaagaatcaccgatgagaagaatatatcgtccggaggatgtgaaggatgcatgcataggagatatgaggaaagaagcaattgaaggcttgttactcacagagcctgaacagtttgaagagggtgagttggaatatatgtacagtgctgaagctctcaaaaagacgaggaggctgaggatacttgtgaaagaatattacaacagagggtttgatgagcctgttgcctatcttcctaacagtctgctttggcttgaatggcgtaactactcttcaaactcatttccatcaaattttgaaccgtcaaagctcgtatatcttactatgaagggtagttctatcatcgaactctggaatggtgcaaagaggttagcatttttgacaactcttgatctcagttattgccacaaattgatacaaaccccagattttaggatgatcacaaatttggaaaggttgatcctgagctcttgtgatgcattggtggaagtccatccatctgttgggtttctcaagaatcttattttgttaaatatggatcattgcatatcacttgagagacttccagcaattattcaatcagaatgtcttgaagttcttgatctcaattattgctttaacttgaaaatgttcccggaagtggaaaggaatatgacgcacttgaagaaactcgacctcacttcaactgggataagagaactgccggcatcaattgagcatctcagttccctggaaaacctacagatgcattcctgcaaccaacttgtaagtctccctagtagtatttggagattcagaaatctgaagattagtgaatgtgagaaactggggagtttaccagaaattcacgggaatagcaattgtacccgtgaactcatcttaaaattagtttcgattaaggagcttcccacctctataggaaacctcacctcactaaatttccttgaaatctgtaattgcaaaactatttcgagtctctcgagcagcatatggggattgacaagtcttacaactctaaagttgttagactgcagaaaacttaaaaacttgcccggaattcccaatgccataaatcatttgtcaggacatggacttcagctccttctgacattggagcagcccacaatttatgaacgccttgacttgcttaggattattgatatgagctggtgtagttgtattagcagtctcccccacaacatttggatgttgaaatttttaaggattctgtgcatctcttactgctcgagactggagtatttaccagaaaatttgggtcacttggaacatttggaggaattacttgcagatggtactggtattttaagactaccatcttcggttgcacgtttaaataaacttgaggtcttatcattcaggaaaaagtttgcgattggaccaaaagtccaatattcatcatcaatgctcaatttacctgatgatgtttttggaagtcttggaagcttaggctcagtggtgaagttaaatcttagtggaaatggtttttgtaatttgcctgaaacgatgaatcaacttttttgccttgaataccttgatataacattttgccagaggctcgaagcattgccagagcttcccccaagcatcaaggagctatatgtagatgaacacttggccttgagaatcatggaagatttagtaattaaatgcaaggagttgaatttaatagccgtcacaaaaattgagtaccaaaatttctatcgatggttagactcaatatggtcagatgtgtcagaactgctggagaacagtcagaagcaacaactggatgatatgttgcagcttattcccttttcatatctgtcgacggctaagcgtgaggaagttcttaagattgttatccatggaacacgaattccagaatggttcagatggcaagatagaagtgccacaacgatgtcagtcaaccttcctgaatattggtacactgaaaatttcttgggattcgctatatgctgcagctgctgcttttatcattctgcacgtagttacgatgttgaatttgaggggagcatgcatcattacaattatgattccagttattggaaagagtatgaggaaccaagttatgacttttatgagagagatagcattgagattacagcaaaactaactccccgacataaaggaatgcggactgaagagctcaagaaagtctgttcattttccatgaatgtgttacgtcgtgctactgctgtccctaatatgtgctttgcattttttccatttaacagtctctgtcacatatcaaatttacaggcaaataacccaaatgactatgggatatttgaaacctgtttgagtccaggggacatccgccatcgtggaaaacaatgggggtttaatttggtgtataaagatgaaactggtggcagtgttacacacgaaatgctcataaacagatag

SEQ ID NO: 399 - DNA, 2538 bp, Nicotiana benthamiana
  source 1..2538: mol_type = genomic DNA
atggtggatgcggtggtcactgtattcttggagaaacttctgcatgttctcacagaggagagtaggtttcttactaaatacagacagcagtttgaaaaactgaagaacgagctgctattcatgcaaagctttctcaaagatgcagagaggctcaagaggaaaaacaacacccttaaaggggtcatgtcctgtttgcgagacttaatctttgaagctgaagagatacttgaggactgccagaatcaatctgcagatagcgatcgggctactacatgcttccatcctaaaaggctctctcttcgccatcaaactgggaagtgccttgctaaaatcaatgacagaatctcggagataaagcaaaacatttcaacatatcttggagtaccacttctcgaagaaggaagtatggaggcacacaataatctaatgtcaagatggacttcttccctttatgaccacactcaggtagttggtttggaaggtgacactgagaagataaaggattggctatttgaagcaagagatggtttacttaccattgcatttgtgggtatgggaggacttggtaaaaccactcttgctcagaaagtcttcaatgacaaaagggtggaggatcacttggagaggaggatttgggtgtctgtttctcaaacatttactgaggaacaagtcatgagaagcatattgaggagtttaggagatgcatgtgttggtgatgaccagtgtgaactgttaagaaaaataaaccagtaccttttgggaaagaggtttttgattgttatggatgatgtttggagctgggacaatgcctggtggcaaaaaatctatactggactgcccaaaggaaatgggagcactgttattgtaacaacgagaaatgagctagtcgctcgcaagatgggagttacagaagcaagaatacattggccaaaattcctcaatgagcactacagttggttactattccggaagattgcatttgcaggaagtgcaggtgaatgccatttccccgagttggaggacgtgggaaaggagattgtggaaaaatgcaagggtcttcctttagcaatcaaagcagtaggaggagtgatgctttgcaagccatcttactatcacgaatggaggcgtatttcaaatcatttccgtgatgaattgaaagaaaatgatgactcagtgatggcctcactacagttgagctatgatgaactccctccttacttgaaatcctgtttcctctgtttttcactatttcctgaggattgtgtcataccaaaagaccaactgatccgttggtggattggagaaggtttcatacctctgagaagtggtaggttatcgactgaagtgggagaagattgtttctcacaactatccaatcggtgtttgatagaagttgttgataaggcttacaatggtgtgatccacacatgcaaaatgcatgacatggttcgtgacttggtgatcaaattagccgaggatgatgcatttttcaccccagctgatgcaacttgtcggcatttgggtattaagagtgagatgaattggaagcaactattgagcaatcaaaaattacgagcactgctaacaaccaccaagagtggtgaagttaacaaaatccattccgacattgccaagaagctgtgcaagagtcgacacctccaagtattggatctgtcaaaatcaattttcgatgtgcctctttcaagtttgttggaaggaattggatctgctaagcagctcacttatctcagtttaagcaatacacatccaatgattggagttccagcttccatatccaagcttgaaaaattacagattttggatttcagctattgccaaaatatgaaaatgctcccctcttgcgttctgacatttgaggaacttgctgttttggatgtgaacaactgtggttcccttgagtaccttccaaaaggattaagtaggctttccaatcttcaagtattgcttgggtttaagcctgcaaaattaagccaaccaggaggttgtcgtattgctgagctcagaagcctgactcgactcagaactctcagtttaagactaaccgaaaatgaggagattggagacgatgaggggaacgcactggtagatctccaagaacttcaatttttaacaataagttgctttggcagtcaagataatggacttgcgacaaaacttggtagactttatcctccacgacaactccacgagctgattctcaaattttatccaagtaagacaagtcctgaatggcttaaccccaatctctcccccatgttgcgatatttatcaatcatctctggtgatattacacaaatgcacgagaacttctggggtgatggtagtactgcttggaaaattgagggcttaatgttggaatctttatcggatttgagattggaatggtcagcaatgcatcaagtcatgccttcgttaagaatactcaaggttagctggtgccctgagttggagtcatttccaattgaagatgcagggtttagagggggtctatggaagaaggaagaacataggaactga

SEQ ID NO: 400 - DNA, 8394 bp, Oryza sativa
  source 1..8394: mol_type = genomic DNA
tcctcgagggtatagaccatatttcccctggtttccattgatgtggcatatatcagggcccactacctcaaccatcaccacgtccagtcctttcggcctgttcgcgatgacgagctcggccaccacctcaacatcgtccatgctgcggcgatggcgaggagacagctgggacggtgaacctcatagctccgtctgttgcaacatcctctcgccatgctcacgtcgccacgacacccttgtcctcctgctccgtagcagcctcgcaagctcacgccgcggcctcgtcgaggtcctctgtccccgagccgcttctagcatcgatgagctgaggaactccccactgccgaggcgatgacgatttggcagggagggctcgattcgcccactccaattcgcagcttcacacctcccctccccctcctattcatccaccaccaacgcggataggagaagggatagaggaaggtgtgcgtggacacttacatgttggtcccatatattttttttactcggatgccacgtcagataaaacaaccgtcggtcaacatttttcgtattgcggattaggaacgtcattcatgactcgacgcagagctgagggatggcaagtgaacttattcccataaaacttccaaaagtttggaatgctcaacttgggcttctcttcggatgctgaagtgctaatgggccaaataaccaactagcccacagcccatcgaagtggaagccgacgagtccaccgtcaacgcggcagtagtaatccgagaaaacgcgggtcgcgcgaagcaatcgatcatcatcagacgattaatccacgacgaccaggagcgctgccccgagccacacgcccacacgcactggtgaatcttctcctttccacctagttttcactctgcagtctcctctcctagctactactctgccttcccatcctcgcttgttgcagccctcttgcacacgccattggccacagtccaaggactgctcctgttccgatggaggaggtggaagccggtttgctggagggcgggatcaggtggctggcggagaccatcctggataacctggacgccgacaagctggatgagtggattcgccagattaggctcgccgctgacaccgagaagctacgggctgagatcgagaaggtggatggggtggtcgctgccgtgaaggggagggcgatcgggaacaggtcgctggcccgatctctcggccgtctcagggggttgctgtacgacgccgacgatgcggtcgacgagctcgactacttcaggctccagcagcaggtcgagggaggaggtactgtctttgcatatatccgtgccttttaattaagtttgcaagctgcgttgcctgcaacaatggcgtattggcgtcagtttccaatccatgcttgtgctacagttactacacggtttgaggctgaagagacggtcggagatggagcagaggacgaggacgatattccgatggacaatactgatgtaccggaggcagtggcggcaggcagcagcaagaaacggtccaaggcatgggaacactttactaccgtagagttcactgctgacgggaaggattctaaagcacggtgcaagtactgccacaaggacctatgttgcacatctaagaacgggacatcagctttgcgcaaccatctcaatgtttgcaagaggaaacgtgtaacaagtactgaccaaccggtaaatccatcaaggtaatgctaatggagttctgaatttagtgtaaatccgttgaagtgtaaatttggcccgttacatctgcttaagatctcattctgtctctaatcttctaatagccaactcatggtcattttttttcctaatatatagtaccggtgatggtgcaccaaatgtaattagatgcaaggaaacaaaagtgaacaattgtatatatcaaatataattatatctaaaacatgagtagtgtatcaaatccaattctttcaaaaatctactatgcaaaattgagtgacaaaatctgctgccttttttttttacagaaagcaaccaattaatataagtcaaatataaaaacgctttgtagtctccaataaaatagctcattgtttcgtttatacttatgtttataaatttaaatttaaaacttaattttggagttgattttgtggttttcttttcatcctattttattttacaacatttgattttgaatagttaagaatgcgtatataaaaattttacccataagttattttttaaattgttaataaatcgtaaggataatcataagtataagtgaaacgattcgctcttcatctacttaagattgcgttatattgctgacctttctaatcgcctaaccacgatcacatgctcttccagtgccggtgagggtgcatcaaatgcaactggtaattcagttggcagaaaaaggatgagaatggatgggacttcaacacaccacgaggcagttagcacgcacccttggaacaaggctgaactttccaacaggatccaatgcatgactcatcagttagaagaggctgtaaatgaggttatgaggctatgtcgatcctcaagttcaaaccagagtcgacagggtacaccaccggccacaaatgcaacaacatcgtcttatcttccggagcccatagtgtatgggagggctgcagagatggaaaccatcaaacagctgatcatgagcaatagatctaatggcataaccgtcctgccaattgtaggcaatggagggataggaaaaaccactttggcgcaactggtctgcaaagatctggtaattaaaagtcagtttaatgttaagatatgggtgtatgtatctgataaatttgatgtagttaagattacaaggcagattttggatcatgtctccaaccagagccacgaaggaataagcaaccttgatacgcttcagcaggatcttgaggaacaaatgaaatctaagaagttcctcattgtcttagatgatgtgtgggaaatccgtacagatgactggaaaaaactactggctcctttaagacctaaagatcaggtgaattcgtcacaggaagaggcaacaggtaatatgataattttgacaactcgtatacagagtattgccaaaagtcttggaacagtacaatcaattaagttagaagctctgaaagatgacgatatatggtcactatttaaagtgcatgcttttggtaatgataaacatgatagtagtccaggcttacaggttcttgggaagcaaattgctagcgagctaaaaggcaacccactggcagcaaaaactgtgggttcactattaggaacgaatcttaccatcgatcattgggatagcattataaagagtgaagaatggaaatccctgcaacaagcttatggcatcatgcaagcgctgaagttgagctatgatcatctatccaaccccttacagcaatgcgtctcttattgttctcttttccccaagggttattctttcagcaaagcacaactaatacaaatatggattgctcaaggatttgtggaagaatccagtgagaagttggagcagaaaggatggaaatatctagctgagttggtaaattcgggtttccttcagcaagttgaaagcacacggttttcatcagaatattttgttatgcacgatcttatgcatgatttagcgcaaaaggtttcacaaacagaatatgcaactatagatggctcagagtgcacagagttagccccaagtatacgccatttgtcaatagtaactgattctgcataccgcaaggagaaatatagaaacatatctcgtaatgaggtgtttgagaaaaggttgatgaaagttaagtcaaggagtaagttgaggtcactggtattaattgggcaatatgattctcatttttttaaatatttcaaagatgctttcaaggaagcacaacatctgcgactgctgcagatcactgcaacttatgctgattctgattcatttctctccagtttggtaaattctacacatctccggtatctgaaaattgtgaccgaagaatccggcagaactttgccccgatctctaaggaagtattaccatcttcaagtactagatattggctatagatttggaattccccgtatatctaatgatataaataatcttctcagcctgcggcatcttgttgcatatgatgaagtgtgttcttccattgctaacattggtaaaatgacctcacttcaggaactaggcaattttattgttcagaataatttaagtggttttgaggtgacacaattgaaatccatgaacaagcttgtacaacttagtgtgtctcagcttgaaaatgttagaactcaggaggaggcatgtggggcaaaactgaaagacaaacaacacttagaaaagctacatttgtcctggaaggatgcatggaatggatatgacagtgacgaaagctatgaagatgaatacggcagtgatatgaatatagaaacagaaggggaggaactgtcagttggtgatgccaatggtgcccaaagcttacaacatcacagtaatataagctctgaacttgcttcaagtgaggtgctcgaaggtcttgaaccacatcacggcctcaagtatctacggatatctgggtataatggatctacctccccaacttggcttccttcttcacttacctgtctgcaaacacttcatctagaaaaatgtggaaaatggcaaatacttcctttagaaaggctagggttacttgtaaagctcgtgttgatcaaaatgaggaatgcaacagaactctcaatcccttcactggaggagcttgtgttaattgcattgccaagcttgaacacatgctcctgcacttccatcaggaacttgaactccagtttaaaggttctgaaaattaagaattgccctgtactgaaggtatttcccttgtttgagatttcccagaaatttgaaatcgagcggacgtcgtcatggttgccccatcttagcaagcttaccatctataattatcctctttcctgtgtgcacagttctctgccaccttccgcaatcagtggttatggagaatatggaaggtgtacccttccgcaatcacttgaggaactttacatccatgagtattctcaagaaactctgcagccctgcttttcagggaacctcactctcctgagaaaattacatgtactgggaaactcaaatttagtgtctctgcagctccattcctgcacagcactcgaagagttgataattcaaagctgtgagtctcttagttctctggatggcttgcaattgcttggcaatctcaggttgctgcaggcacatagatgcctcagtggtcatggagaagatggaaggtgtatccttccgcaatcacttgaggaactttacatccatgagtattctcaagaaactctgcagccctgcttttcagggaacctcactctcctgagaaaattacatgtactgggaaactcaaatttagtgtctctgcagctccattcctgcacagcactcgaagagttgataattcaaagctgtgagtctcttagttctctggatggcttgcaattgcttggcaatctcaggttgctgcaggcacatagatgcctcagtggtcatggagaagatggaaggtgtatccttccgcaatcacttgaggaactttacatccatgagtattctcaagaaactctgcagccctgcttttcagggaacctcactctcctgagaaaattacatgtactgggaaactcaaatttagtgtctctgcagctccattcctgcacagcactcgaagtgttgataattcaaagctgtgagtctcttagttctctggatggcttgcaattgcttggcaacctcaggttgctgcaggcacatagatgcctcagtggtcatggagaagatggaaggtgtatccttccgcaatcacttgaggaactttacatccatgagtattctcaagaaactctgcagccctgcttttcagggaacctcactctcctgagaaaattacatgtactgggaaactcaaatttagtgtctctgcagctccattcctgcacagcactcgaagtgttgataattcaaagctgtgagtctcttagttctctggatggcttgcaattgcttggcaatctcaggttgctgcaggcacatagatgcctcagtggtcatggagaagatggaaggtgtatccttccgcaatcacttgaggaacttttcatcagtgagtattctctagaaactctgcagccctgcttcctgacgaatctcacctgcttaaaacaattaagggtatcaggcaccacaagtttcaaatctctagaactgcaatcatgcactgcactcgaacatttgaagattcaaggttgtgcgtcgcttgctacattggaggggttgcaattcctccacgccctcaggcatatggaagtattcagatgccctggcttgcctccatatttggggagttcgtcagagcagggctatgagctatgcccacgactggaaaggctcgacatcgatgacccctctatccttaccacgtcgttctgcaagcacctcacctccctccaacgcctagagcttaactattgcggaagtgaagtggcaagactaacggatgagcaagagagagcgcttcagctcctcacgtccctgcaagagctccggtttaagtattgctacaatctcatagatcttcctgcggggctccacagccttccctccctcgagaggttggagatccggagttgcaggagcatcgcgaggctgccggagaagggcctcccaccttcgttcgaagaactggatatcatcgcttgcagtaatgagctagctcagcagtgcagaactctagcaagcactctgaaggtcaaaattaatgggggatatgtgaactgattactcggtggcttgttaggcgcacctttttccacctgcccaactggcgtgggctcgttcaggcgttcaagctgctgtaaattccattgccgcaatgacgaccttcagaaccgttacacaatacaaaggacatatgatggctagatcaactgtcgcagagctagctttggttcacctgaaaacataaggccaaacgcgtggttcttttaatcagaagtatcaaaaattggttttggtttttaacgaaaagatgttagaaattggttttaatgtgccagattctgtaccagaattctgtattttgctccgtaattctgtgctacgactgatgttgtatttaactgatagcaatcgaccggcaaaaccaatccgctccaatgcattgtcacatacaaattctataattctatctactgaaaaggatgattgctgttcattttcgtgattacagaaggaactgtgtatatcgtgctatttttgcattcacattgtgtcccaggttgtgctcggatcagccaatttcggtggttaattcactttgttgtgtcctctgtgcactcaagaattgttcgcacatgcaattcagttgagcatcgcactacgcaagttttttttgttaacaaaggagtggttgacagcattgcaggttgctaaaaccgtgtcaaaaatttgctaacaaaagaattctcttcagaaatagtatgaaaataaatgccacataagtaatctgagtaaaacagacagaatcactagagaagactaacgacaaaatcttctttttcaatttctgtggtgaaaaactcactaactccgcatataatctcatgtatgcattggaggtgcataccatttcgatcatgtatgcatttagctgaacattatcaagaagcaaatttattgcacgggcaaacataagctaaactaattctcaagcaatttaataatcacaaaacagtctgcaataccaagatatataaaacttttgccagcatggagcaacaacaccgaaacactacaatcaagacagctcccagaaaagattatatgttgctacttcaattgccacagttacaatcacccataatgacacatcaaattacataagagtattaagagtatatgacagttgtaacaaaacaactgcattgagaactagaacagacagccacatgaaccatattcacttcttcagatcagaaagcctggtgaactaccagtctaccaattgctaccgtagtctccatttttcacttatatgtacataggacacctgcgctatcagaatagccacaaagccagttcactcgctacaaattaatcttgactaaatccaaacagataccaactcctcttaatcaacttacaaaacacctacacttttggtgtctctacaccaccaatcacacaaaaggaaattaatcatccaccaactcgtatcctactgttagaatggaggccttacaccagagaatgggcattgccagattctgagacactgtcctttgagctccctga

SEQ ID NO: 401 - DNA, 3441 bp, Solanum lycopersicum
  source 1..3441: mol_type = genomic DNA
atggcatcttcttcttcttcttctgcaagtaattcaaagtattatcctcgatggaagtacgttgtttttctaagtttcagaggtgaagacactcgaaaaacatttacaggtcacttatacgaaggtttgagaaatagaggaataaacacatttcaagatgataaaagactagagcatggagattcaattccaaaagaactcttgagagctatagaagattctcaagttgcacttatcattttctcaaagaattatgctacatctaggtggtgcttgaatgaactagtgaagatcatggaatgcaaagaggaagaaaatggacaaacagtcataccgatcttttataatgtggatccatcacatgttcgataccaaactgaaagctttggagcagcatttgccaaacacgaatcaaagtataaggatgatgttgaggggatgcagaaggtgcaaagatggagaactgccctaactgctgccgcaaatctaaaaggatatgatatccgtaacgggattgaatcagagaatattcagcagatcgtagattgcatctcttccaaattttgtacgaatgcttattctttatcttttttgcaagatattgtgggaataaatgctcacttagagaaactaaaatcgaaacttcaaatagaaatcaatgatgttcggattttagggatctggggaataggcggagtcggtaaaacaagaatagcaaaagccatttttgatactctatcttatcaatttgaagcttcttgttttcttgctgatgttaaagaatttgcaaaaaagaataaactgcattctttacaaaatattcttctctctgaactgttaaggaaaaaaaatgattacgtctacaacaagtatgatggaaagtgtatgattccaaacagactttgttctttgaaggttctaattgtgcttgatgatatagatcatggtgatcagatggagtatttagcaggtgatatttgttggtttggtaatggcagcagagttattgtaacaactagaaacaaacatttgatagagaaagatgatgcgatatacgaagtgtctacactgcctgatcatgaagctatgcaattattcaatatgcatgcttttaaaaaagaagttccaaatgaggattttaaggagttggcgttagagatagtaaatcacgctaaaggcctccctttagccctcaaggtgtggggctgtttattgcataaaaaaaatctctctttatggaaaataacagtagagcaaataaagaaagactctaattcagaaattgttgaacaactcaaaataagttatgatgggttggagtccgaagagcaggaaatatttttagatatagcatgtttcttccgcggagagaaaagaaaagaggtcatgcaaattcttaagagttgtgactttggagctgaatacggattggatgttctgattaataaatctcttgtgttcatatctgaaaatgacaggattgaaatgcatgatttgattagagatatgggtagatatgtggtgaaaatgcaaaagcttcagaaaaaacgtagcagaatatgggatgttgaagatttcaaagaagtgatgatagactatacggggaccatgacagtggaagcaatctggtttagttgctttgaagaagtacgttttaataaggaggcaatgaaaaaaatgaaaaggcttaggatattacacatatttgatggttttgtcaaattcttctcttcgcctccctcttccaattccaatgattcagaagaagaagatgattcctacgacttagtcgtagatcaccatgatgactctattgagtacctgtccaataacttgcgttggttagtctggaatcactattcttggaagtcattgccagaaaattttaaaccagaaaagcttgttcatcttgaactccgttggagttcgcttcattatttatggaagaaaacagagcatttgccgtctctacgaaagctagatctcagcttatctaaaagtctggtgcaaacaccagatttcacggggatgccaaatttggagtatttgaatctggagtactgtagtaagcttgaagaggttcactattccctagcatattgcgaaaaactcattgagttaaatttgagttggtgtacaaagcttaggagatttccatatattaacatggaatctcttgaatctctggatctacaatattgctatggtataatggtgtttccagaaatcatcggaacgatgaagccggagttaatgattctctcagcaaacactatgataactgaactaccatcatctcttcagtacccaactcatctcacagagctagatttgagtggcatggaaaaccttgaagctcttccaagcagcattgtcaagttgaaagatttggtgaagctaaatgtgtcgtactgcttaacgcttaaaagcttgcctgaagagattggtgatttagaaaacttggaggaacttgatgcttcgcgtactctaatttcacagcctccatcttccattgtccgcttgaacaagcttaaatccttgaagttaatgaaacgaaacacattaacagatgatgtgtgctttgtgtttcctcctgtgaataacgggttactctcattggaaattctggagctcggttcctccaatttcgaagatggaagaattccggaagatattggatgtttatcctctttgaaagagttacgtctcgagggagataatttcaatcatttgcctcaaagcatagcccaacttggtgcacttcgattcttatacataaaagattgcaggagtcttacaagtctgccagaatttccaccgcaattagatacaatatttgcagattggagcaatgatttgatctgtaagtcactgtttctaaatatctcatcattccaacataacatctctgcttcagattcgttgtcgttaagagtgtttacgagtttggggagtagtatcccaatctggttccaccatcagggaacagatacaagtgtttcagtcaatttgcctgaaaactggtatgtatcagataacttcttgggattcgctgtatgttactatggcaatttaactgagaacacagctgaattgattatgagttctgcagggatgccatgtatcacctggaaacttttgttatcgaatcattcagaatgtacatatattaggattcattttttcttggtaccttttgctggcttatgggatacatctaacgccaatggtaaaacaccaaatgactataagcacattatgttatcttttcctcaagaattgaaggagtgtggagttcgtttgttctatgaagatgaatctgtgcttgagaccaccaatgatgaacttaccattggggtaaggaggatcagatacgacgacgacgatagtgaacattatgaggaggctggttgttcctcttctaagaaacaaagatcataa

SEQ ID NO: 402 - DNA, 2718 bp, Zea mays
  source 1..2718: mol_type = genomic DNA
atggcagagattgctgttcttctcgtcctgaagaagattgccatagctctggcaggagagaccctaagttttgctaaaccattgcttgcaaagaagtctgagtcggtggcagcactcccagatgacatgaaactgattagtaatgagctcgagcttatccgggcgtttctcaaggaaatcggcaggaaaggctggaaaagcgaagtgatagaaacatggatagggcaggtccgaagactggcttatgatatggaagacactgtagaccattttatttacgttgttggtacacacgatcagatgggatcatgctgggattacatgaagaagatagccaagaagcctcggcgtctggtttcactagatgaaattgctagtgagattaagaagataaagcaagagcttaaacaactctcggaaagtagagaccgctggactaaacccttggatggcgggagtggtatacctgcaggaagctatgaaactgaaaaggaaatgtatcttcctggacatgattacacaatcagcgacgaggagcttgcaggaattgatgaaaataagcaaaccttgattagttcattaaaatttgaagatccatcacttcggatcattgctgtctggggtatgggtggcgttggaaaaagcactcttgtaaataatgtgtacaaaaatgaaggatccaactttgactgccgtgcatgggtttctatctctcagtcatatagactagaagatatatggaagaaaatgctgacagatctcatcgggaaagataagatagaatttgatcttggaacaatggatagtgcagaactaagagagcaattgacaaaaactctagacaaaaggcagtacctgatcatactggatgatgtctggatggctaatgttttttttaaaattaaagaagttcttgtagataatggccttggaagcagagtaataatcacaacaagaattgaggaggtagcttcactagctaagggtagttgtaagatcaaagtagaacctctgggtgtcgatgattcctggcatgtattttgtaggaaggcatttctgaaagatgaaaaccatatctgccctccagagttgcgtcagtgtggtataaacattgtggagaaatgtgatggtttgccattagcccttgtggcaataggaagcatattgtcgctgagaccgaagaatgttgacgagtggaagctattttatgaccagcttatctgggagctacacaacaatgagaaccttaatcgcgtggagaaaattatgaatctaagttataaatacttaccagactatttgaagaactgcttcctgtattgtgctatgtttccagaagactatctaatacacagaaagagattgattagattgtggatagctgaaggatttattgaacaaaaaggggcatgcagcttagaagacactgctgaaagttatcttaaagaacttatacgacggagcatgcttcacgttgcagagaggaactgctttggtaggattaaatgtattcgaatgcatgatcttgtgcgtgaacttgccattttccaatctaaaagagagggtttcagtacaacttatggtggaaataatgaagcagtgctagtgggatcatattctcgacgagtggctgtgctccaatgcagcaagggcattccatcaaccattgatccatccaggcttcgcaccttaattacattcgacaccagcagagcattatctgtgtggtattcttctatttcctccaaaccaaagtaccttgcagtattagacttatcaagcttgcctattgagactattccaaattcaattggagagcttttcaaccttaggcttttatgcctcaataaaaccaaagtgaaagagctccctaaatctattacaaaacttcaaaacctacagacaatgagtcttgagaatggggagttagtgaagttcccacaagggttttcaaaactgaagaaattgcgacatcttatggtttcacggttgcaagatgtaactttcagcggtttcaaaagttgggaagctgtggagccatttaagggcttgtggactttgattgaactgcaaactctgtatgccattacagcaagtgaagtattagttgcaaaacttggaaatttatcccagctgaggcggcttataatttgtgatgtaaggagtaacttatgtgcacagttgtgtggctctttgtcaaagttgtgccagctgtcacgattaacgataagagcatgcaatgaagatgaagtgctacagctggatcatttgacatttccaaatcctcttcaaacccttagtttagatggacgactgtcagaaggaactttcaaatctccctttttcttaaatcatggaaatgggcttcttaggctaatgttgttttacagtcagctttcagaaaatccagtaccacacctctctgaattgtcaaacttgactaggttatcccttataaaggcatacaccggccaagaattatacttccaagcaggttggttcctgaatttaaaagaactttacttgaagaatttgtcccggctcaatcaaatagacatacaggagggagctttggccagccttgaacgtataacaatgaaacacctcccggagctacgggaggttccagtcggtttcagatttctcaagtccctaaaaacaatatttttttccgatatgcatcctgagtttgaaagcagctttcaaaaggaaatgtag

SEQ ID NO: 403 - DNA, 1005 bp, Oryza sativa
  source 1..1005: mol_type = genomic DNA
acattggtagtagtgcaatgtcagagcttcaatcactgccagacctcaatagactatcactagtgaaccttgaaaaggtttcagacactgaagatgcaagaatggcaaaacttcaagagaaagaaaagctcgagacattgatgttgaggtggaatatggatgctggaaatgccagtagaatagatcatgaagtacttgaaaccctccaacctagccagtgcctgaaaactttggagattgttgcgtatgaaggatatgtatttccatcttggatgacaagaaccgagccatatcttacatctctggttgagataagactagttaatatgagagcatgtgaaaaggcattacctccacttgggatactaccatgtctgaagattgcagagataagtggagttgataatctcagttctattggtgataatttctatggtcataacggcacattcccttcactggagaagctgattctatcatacatgacaagccttgaagtctgggaacagtcatctaggatgaatctgtttcctcgtcttgcagaacttgtcatcattcagtgcccaaaattgagagcactgcatatggagtttccatcgattgaaaagttgattttgtggatgaataacaagatgttgtacagctcgaaggaaggtatgagaggtgtagagaagagcctcgaaaatctttcaatttctttctgtgaagagttgcatgcttcttcaggctgtgagggtctacaggctcttgatcgcctcaagaagttggagatatgtggttgtcatgaattatcatgcctcccacagggtttgcagcatctttcctctctcaccagcttgaaaattgataactgcaacaaattggagattttgccagaatggttggagaacctaccttttctacagataatgtgtttgtctggctgtccaattctgcactccattcctgaaggcctaacatgtagcgacattattgttgaagattgccccaattttaaagaaccat

SEQ ID NO: 404 - DNA, 3102 bp, Oryza sativa
  source 1..3102: mol_type = genomic DNA
atggcggagacggtgctgagcatggcgaggtcgctggtgggcagtgccatcagcaaggccgcctctgccgctgccaatgagacgagcctcctgctgggcgtcgagaaagacatctggtatatcaaagatgagctaaaaacgatgcaagcattccttagagctgctgaacttatgaaaaagaaagatgaactattaaaggtttgggcagagcaaatacgtgacctgtcatatgacattgaagattcccttgatgaatttaaggtccatattgaaagccaaaccctatttcgtcagttggtgaaactcagagaacgccaccgaattgctatccgtatccacaaccttaaatcaagagttgaagaagtgagtagcaggaacacacgctacagtttagtcaagcctatttcctctggcacagagattgacatggattcctatgcagaagacattcgtaatcagtcagctcgcaatgtggatgaagctgagcttgttgggttttctgactccaagaaaaggctgcttgaaatgatcgataccaatgctaatgatggtccggccaaggtaatctgtgttgttgggatgggtggtttaggcaagacagctctttcgaggaagatctttgaaagcgaagaagacattaggaagaacttcccttgcaatgcttggattacagtgtcacaatcatttcacaggattgagctacttaaagatatgatacgccaacttcttggccccagttctctggatcaactcttgcaagaattgcaagggaaggtggtggtgcaagtacatcatctttctgagtacctgatagaagagctcaaggagaagaggtactttgttgttctagatgatctatggattttacatgattggaattggataaatgaaattgcatttcctaagaacaataagaagggcagtcgaatagtaataaccactcggaatgttgatcttgcggagaagtgtgccacagcctcactggtgtaccaccttgatttcttgcagatgaacgatgccataacattgctactgagaaaaacaaataaaaatcatgaagacatggaatcaaataaaaatatgcaaaagatggttgaacgaattgtaaataaatgtggtcgtctaccattagcaatacttacaataggagctgtgcttgcaactaaacaggtgtcagaatgggagaaattctatgaacaccttccttcagaactagaaataaacccaagcctggaagctttgaggagaatggtgaccctaggttacaaccacctaccatcccatttgaaaccatgctttttgtatctaagtatctttcctgaggattttgaaatcaaaaggaatcgtctagtaggtagatggatagcagaagggtttgttagaccaaaggttgggatgacgactaaggatgtcggagaaagttactttaatgagctaatcaaccgaagtatgattcaacgatcaagagtgggcatagcaggaaaaattaagacttgtcgaattcatgatatcatccgtgatatcacagtttcaatctcgagacaggaaaattttgtattattaccaatgggagatggctctgatttagttcaggaaaacactcgccacatagcattccatgggagtatgtcctgcaaaactggattggattggagcattattcgatcattagctatttttggtgacagacccaagagtctagcacatgcagtttgtccagatcaattgaggatgttacgggtcttggatcttgaagatgtgacattcttaatcactcaaaaagatttcgaccgtattgcattgttgtgccacttgaaatacttgagtattggatattcgtcatccatatattcacttcccagatccattggtaaactacagggcctacaaactttgaacatgccgagcacatacattgcagcactaccaagtgagatcagtaaactccaatgtctgcatactcttcgttgtataggacagtttcattatgacaactttagtctaaaccacccaatgaagtgcataactaacacaatatgcctgcctaaagtattcacacctttagttagtcgcgatgatcgtgcaaaacaaattgctgaattgcacatggccaccaaaagttgctggtctgaatcaatcggtgtgaaggtacccaaaggaatagataagttgcgagacttgcaggttctagagtatgtagatatcaggcggaccagtagtagagcaatcaaagagctggggcagttaagcaagctgaggaaattaggtgtgacaacaaacgggtcgacaaaggaaaaatgtaagatactttatgcagccattgagaagctctcttccctccaatctctccatgtggatgctgtgttattctcaggtattattggaacacttgagtgcctagattctatttcatctcctcctcccctactgaggacactcgtgttggatggaattcttgaggagatgcctaactggattgagcagctcatgcacctgaagaagatctacttattgagcagcaaactaaaggaaggtaaaaccatgctgatacttggggcactgcccaacctcatggtccttcatctttatcggaatgcttaccttggggagaagctagtattcaaaacaggagcattcccaaatcttagaacactttggatttatgaattggatcagctaagagagatcagatttgaggacggcagctcacccctgttggaaaagatagaaataggcgagtgcaggttggaatctgggattactggtatcattcaccttccaaagctcaaggagattccgattagatacggaagtaaagtggctgggcttggtcagctggagggagaagtgaacgcacacccaaatcgccccgtgctgctaatgtacagtgaccgaaggtatcacgacctgggggctgaagccgaaggatcttctatagaagtgcaaacagcagatcctgttcctgatgccgaaggatcagtcactgtagcagtggaatcaacggatccccttcccgagcaggaggagagagctcgcagtcgcaggtgatcacgttgacgacgaatgatagcgaagaagataggcacagctcaagctggctga

SEQ ID NO: 405 - DNA, 4288 bp, Oryza sativa
  source 1..4288: mol_type = genomic DNA
caccgagtgtgagcggcaacggcggtcagggagcaggcgtggctcgtcggcgagcggctacgggcaacggcgccttggcgtcaggcatccgccgtcactcacctcaagcttgcgggctctgcgaccaccctctcatagtcataggccacagaagcacatttgccttgtgcgtgctgttcgtctgttccactcgtgaacatcagacgcgaagattatagattcacccctgttcacagattcaggtctgtcacgaggcgtatgatcatcaactctgccacaaaatccattcaaaaatagaacagagcaatggaggcgacggcgctgagtgtgggcaaatccgtgctgaatggagcgcttggctacgcaaaatctgcatttgctgaggaggtggccttgcagcttggtatccagaaagaccacacatttgttgcagatgagcttgagatgatgaggtctttcatgatggaggcgcacgaggagcaagataacagcaaggtggtcaagacttgggtgaagcaagtccgtgacactgcctatgatgttgaggacagcctccaggatttcgctgttcatcttaagaggccatcctggtggcgatttcctcgtacgctgctcgagcggcaccgtgtggccaagcagatgaaggagcttaggaacaaggtcgaggatgtcagccagaggaatgtgcggtaccacctcatcaagggctctgccaaggccaccatcaattccactgagcaatctagcgttattgctacagccatattcggcattgacgatgcaaggcgtgccgcaaagcaggacaatcagagagtggatcttgtccaactaatcaacagtgaggatcaggacctaaaagtgatcgcggtctggggaacaagtggtgatatgggccaaacaacaataatcaggatggcttatgagaacccagatgtccaaatcagattcccatgccgtgcatgggtaagggtgatgcatcctttcagtccaagagactttgtccagagcttggtgaatcagcttcatgcaacccaaggggttgaagctctgttggagaaagagaagacagaacaagatttagctaagaaattcaatggatgtgtgaatgataggaagtgtctaattgtgcttaatgacctatccaccattgaagagtgggaccagattaagaaatgcttccaaaaatgcaggaaaggaagccgaatcatagtgtcaagcactcaagttgaagttgcaagcttatgtgctgggcaagaaagccaagcctcagagctaaagcaattgtctgctgatcagaccctttacgcattctacgacaagggttcccaaattatagaggattcagtgaagccagtgtctatctcggatgtggccatcacaagtacaaacaatcatacagtggcccatggtgagattatagatgatcaatcaatggatgctgatgagaagaaggtggctagaaagagtcttactcgcattaggacaagtgttggtgcttcggaggaatcacaacttattgggcgagagaaagaaatatctgaaataacacacttaattttaaacaatgatagccagcaggttcaggtgatctctgtgtggggaatgggtggccttggaaaaaccaccctagtaagcggtgtttatcaaagcccaaggctgagtgataagtttgacaagtatgtttttgtcacaatcatgcgtcctttcattcttgtagagctccttaggagtttggctgagcaactacataaaggatcttctaagaaggaagaactgttagaaaatagagtcagcagtaagaaatcactagcatcgatggaggataccgagttgactgggcagttgaaaaggcttttagaaaagaaaagttgcttgattgttctagatgatttctcagatacctcagaatgggaccagataaaaccaacgttattccccctgttggaaaagacaagccgaataattgtgactacaagaaaagagaatattgccaaccattgctcagggaaaaatggaaatgtgcacaaccttaaagttcttaaacataatgatgcattgtgcctcttgagtgagaaggtatttgaggaggctacatatttggatgatcagaacaatccagagttggttaaagaagcaaaacaaatcctaaagaagtgcgatggactgccccttgcaatagttgtcataggtggattcttggcaaaccgaccaaagaccccagaagagtggagaaaattgaacgagaatatcaatgctgagttggaaatgaatccagagcttggaatgataagaaccgtccttgaaaaaagctatgatggtttaccataccatctcaagtcatgttttttatatctgtccattttccctgaagaccagatcattagtcgaaggcgtttggtgcatcgttgggcagcagaaggttactcaactgcagcacatgggaaatctgccattgaaatagctaacggctacttcatggaactcaagaatagaagcatgattttaccattccagcaatcaggtagcagcaggaaatcaattgactcttgcaaagtccatgatctcatgcgtgacatcgccatctcaaagtcaacggaggaaaaccttgtttttagggtggaggaaggctgcagcgcgtacatacatggtgcaattcgtcatcttgctataagtagcaactggaagggagataagagtgaattcgagggcatagtggacctgtcccgaatacgatcgttatctctgtttggggattggaagccattttttgtttatggcaagatgaggtttatacgagtgcttgactttgaagggactagaggtctagaatatcatcaccttgatcagatttggaagcttaatcacctaaaattcctttctctacgaggatgctatcgtattgatctactgccagatttactgggcaacctgaggcaactccagatgctagacatcagaggtacatatgtaaaggctttgccaaaaaccatcatcaagcttcagaagctacagtacattcatgctgggcgcaaaacagactatgtatgggaggaaaagcatagtttaatgcagaggtgtcgtaaggtgggatgtatatgtgcaacatgttgcctccctcttctttgcgaaatgtatggccctctccataaggccctagcccggcgtgatgcgtggactttcgcttgctgcgtgaaattcccatctatcatgacgggagtacatgaagaggaaggcgctatggtgccaagtgggattagaaaactgaaagacttgcacacactaaggaacataaatgtcggaaggggaaatgccatcctacgagatatcggaatgctcacaggattacacaagttaggagtggctggcatcaacaagaagaatggacgagcgtttcgcttggccatttccaacctcaacaagctggaatcactgtctgtgagttcagcagggatgccgggcttgtgtggttgcttggatgatatatcctcgcctccggaaaacctacagagcctcaagctgtacggcagtttgaaaacgttgccggaatggatcaaggagctccagcatctcgtgaagttaaaactagtgagtactaggctattggagcacgacgttgctatggaattccttggggaactaccgaaggtggaaattctagttatttcaccgtttaagagtgaagaaattcatttcaagcctccgcagactgggactgcttttgtaagcctcagggtgctcaagcttgcaggattatggggcatcaaatcagtgaagtttgaggaaggaacaatgcccaaacttgagaggctgcaggtccaagggcgaatagaaaatgaaattggcttttctgggttagagtttctccaaaacatcaacgaagtccagctcagtgtttggtttcccacggatcatgataggataagagccgcgcgcgccgcgggcgctgattatgagactgcctgggaggaagaggtacaggaagcaaggcgcaagggaggtgaactgaagaggaaaatccgagaacagcttgctcggaatccaaaccaacccatcattacctgagctcctttggagttactttgccgtgctccatactatcctacaagtgagatcctctgcagtactgcatgctcactgacatgtggacccgaggggctgtggggcccacatgtcagtgagcagtactgtgcagtactgcagaggacctgcatccactatcctatattataatggattgtactatcgatccaactattcagattaactctatactagtgaacttattttt

SEQ ID NO: 406 - DNA, 11516 bp, Oryza sativa
  source 1..11516: mol_type = genomic DNA
aagcttgaaagtgtgtgaagaaatgaagaaagtgaagtctacttataggacaggtataacggttatgagaagtggaaatgtccgaactgccccgcaaccgccatcagggagtgatctggagcgtccacgccaaaccccaggatcaacggtgatcaccagggttcggctgaacctgggctgggccagatggcttccaaacctagtctgggtctcctcctcgacctgccttatccaattcttgcaattttgggatgtttctttagtagtttaaaagcccattcttgcattgatagatttctccttcacttttagtctggatttcctcccaacttctgggtttatcacctgcataaaaatatacatcaacaattgtggaatatgtgagttttaacacctatcactatgttggatattttattatctggactttatgcagacgttgacggtatagatttggcatttaacagtcgccaacattatacaatcgggtaaatagtattgatgtattccatgaatctgtgtatagaaggtatgccatatccttgacactgacaccatatgtgtttccgtttttgagaaaacatttccatttccaaaaatttctgaccaacactctctatttccgaaaactcatctgaaatccgaaaacttttcaaaccgttttcatcccagtaatgaatggcaggctctacgtgcagacccacaaatgctccacaaagatctcaaaaaatttatcgtataaatttcatacgtagactaaatttcacaaaaattcacttgtgtacccattgaggtatgtattttgttttcaaaaaaaaacacagtttaccttgtggtgctcgggacatcggccggagctcatgatcataatggagtcagtcagggtggctactggagcttatggcggaggaggtcagggtggtgggacgtggggcagagtttagtccggtcggcaaccagagctccgagaggagatctgggcagtagtgagagaagggtcaggaggcgccagagtggccacgacggaggctgggaaagcgatgccgaacagcaaagcatgcgttgaagtaggcggggtggcagcagcctcggggcggagcgggcatggaacaagggtagagctggagtcggtggccggctactgagaccattcacagtgcgtcaccaagttttgatattcttcacatgccacgtagatcagagcggtattagccacatgttacatagtgcaaaactctacaagaccacatatgggttgcttgtagtgggtcccactaataccacttttacacttctctttttacttttcccctctcctctctcccctctcttcctttccccaccggccaccgcagagagccgggcggagacggaggttgcgggggtcgggcggagcggcggctcaagcggaggtcgtggaggcgagcaggagacggcgccgggccgagtggcgacggcggtggggcctagcaccgtgcctcccctcctcctcctcctctagtggtggcgaatcgaggaagccgccgccgccgcgccccacctcttcatctgatgcgggcgggaagctgccgccaccgccgtcgggcagatccagatctccggcctccgtgtcgggcggctacgcggcggcgggcgtcggcgtcggtcagcgccctcctcacctggccagcccaccgactagccctaccgtcgtcatcatccctggtcagcaccctcctcccctggcattcggctgcctcacccctctcctctctctcctctagcggtggtgtgggtcccacctgtgggtccctctgagacgaagaacgcgtagtcaactttggctacgcgcggagctgaggaacgcacacgattggataaagtggcaaaggaatatttgcttttttggttgaggctaaatgctacgtagatctactgtgaatggcctgatggcgcagcggctctcttgcgggacagagtgggacgtgcacgacgagaaatttcctcttgcatgaataacccacggatgtaggcctccttaactaggagctacgaggtgggatttgggaggctttttctatttcaaggcttaaagcctatccaatatgatctctaatcttaaaatttagtgtttatttttgaaaaaaagttggctccaataattttcctaattagcttccaaaaattggaatcttactccctatccttctcgctctccactagtggagaagcgtgctagttcttaacacacgcatgggtggagggatcacatggatattatggaaatatcctcatggactggtgattaacatagtcctactaggagagaattgagtttattctatatcgttatcgacgtttggtatcacgactacgttatttggatggtatggggatcatcggtactagagtatatgcgagattgaggtaaaagagatggagacagatatttttatactggttcgccccttatctaacaggtaatagccctacatcctgttggctaaagccggtattgctcttattcatctgaatcgcacaagtataatatttaggataacctgtctagctgtcatcgacttggcggcatggataaccaactcgtagtcgatgacggggtagtatttctcttcgaatatgaactcgtcgagatcagagatggctctagatctctcttgccggtctcaggaggcaccagatggggtatgcctaggctaatctctaatgtcgatatttagcggcgtattggcttgtgtgtatgttatgtgttgtggctcgtcatctctcctcctagggggcttgtatttatacccatagatgcccccttgtctaagtagaactagggagataaatatggatacgatccgagtagtccttgtcgtttccatatagaactctttttgtcctttcttatccgaaactccttttatatacgaggtatgattccatataagacatggtatatggtgggccctgccgagcttagtcaggaatgtggtatccacaaccctgacaatcatgcagggttcattgtctccgagttctacgcggagactaagacaactcaaggtataaaaggcgcactctctaaggggttcaaaagagcaaatcatagcacgaacacacccaccatagtttacgaagccagaggctgtgaagcctactcgccaggagatcttgtcgactcatctcgacaaggatctcgccggtaacgctggattcatctcttctctttgtactccgtggtttccatatcaatctcatataaactggattatggttattatcttacgaggggtctaaaccagtataatctttgtctctctgattgttttaatatcgtatcatgtagatcctcataccaacttaccctaatacactatttatccgatctacaggtatcccctatcgacaataggtatataagatattataaaaaagatggagacatatgtgagctgatgatttaggctgcattcgttgcagcttctttccaacccatctccctcgttttccgtgcgcatgcttttcaaactgctaaacggtgcgttttttacaaaaagtttatatacgaaagttgcttaaaaaaatcatattgatccattttttaaaaagatagcaaaaaattaagtaatcacacgctaatggactactctgttttccgtgccggaggatagctttcccaacccagggaaacgaacccaaccttaggtgtgttcattgctaggtgttcccaacccctctcccttatattccgtgcgcatgcttttcaaactgttaaacggtgtgtctctttttaaaaaatttctatacgaaagttgctaaaaaaatcatatcaatacatttttgaaaaaaaaagctaatacttaattaatcacgtacgtactaatagaccgcttcgttttctatgcgcagaagatttgttcccaacccccacaacaaacacagccttaacatgcttgcatttaaaaagctataaaatttaataaattataaaattatagataatataacatgcttacttgatgtgacactttacctgttaagttttaggagtcggtgtttagattcaaactttttttttcaaacttccaacttttccatcagatcaaatgtttgggcacatgcattcagcaataaatgtggacaaaaaaaaaccagttgtacagtttgcatgtaaatcacgagatgaatcttttgagcctaattacgtcatgatttgacaatgtggtgctaaagtaaatatttactaatgacagattaattaggtttaatagatttgtctcgcagtttacaggcgaaatatataattttttttgttattagtttatatttaatacttaaaatgtatgtccatatacttaaaaaaattttgtaccacgaactaaacacagccaagtggactctaactctctctctctctatatatatatatatatatatatagtaatgtgttcgtatgtcctggatagaaactcatttcctccgcatagaaaacggagcggtctattaatacgtgattaattaagtattagctatttttttcgaaaataaattaatttaattttttaaataacatttatatagaaactttttaaaaaacacgttgattaaccatttgaaaagcgtgcgtgcacgcggcgtgaaaaatgaggcagagatgttgtgaaaaggagtgccgaacacagtcaaagcctcaggtggtgtttggatccagggacttaacttaaactttagtccctatatttagacactaatttatagtattaaatatagactacttataaaactaattacataaatgaaagctaattcacgagacaatttttttaagcctaattaatccataattaaagaatgtttactgtagcatcacataggctaatcatggattaattagacttaatagattcatctcgtgaattagtccaagattatagatgggctttattaatagtctacgtttaatatttataattaattttcaatccaatatgataggacttaaaatttagtcccatctacagggtcagaggattcggtcggtctcagggcagtcctctccgtataacgcagcgcccgatattttttatgggcataaatagtctgattgctactgtagcattttgttcaactaactccccaatgggcaatggctagtcgtcgagtgtcagtagtcaagagtagactccgcttcgcttcgccgtaccttctctcttctcgttctcctatttcacaaatcacaaccggattgctttcttccttcctccggtctggtccccaacctccgcggcagccatggttggcgccgagatgcttgtggccgcggcggtgagccaggtcgcccggaagatcaacgacatcgtgggggtcgcgcagggcgaggtgaagctgtgctgcaatttcagcgacgatttggagggcatcaaggatacccttgtgtacctggaaaccttgctgaaaaatgcggagaataactccttcggaagcgacagggccaacctgcgccactggcttggccagatcaagtccctggcttacgatatcgaagatatcgttgatgggtactactcttccaaggagcagttcgatgggggcagctatgcacagaaggtaacagaatctcattcctttttcttcatcggtaaaatttcttcaatttcaactcaattttagaatgccccgcaaaaaaaaaatcaattttagaatggatctacattaatgagatgtagaggtgtattactatgggcaggggaagcaccgtgtgtgcatccttagttactgcataggcaataagttatcctttccattgtccaaaaaaattttgaagcaaggaggaaaagcttgaagcttagtcttttagttttttctttttgattattttgttatttatctcagttatgagattaggagtgtatatgcactcgtgtagcttttgtctgtgtgtggatatagaggctggatttctatccattatcttaaataaattgtccaagaaatttatcaggggaaatgcagttagatgcaccattagaattgcttcattgcctgtggaagagtggaacagctctgagaattgtgattatgttttatatatttaaacaatattgattactagtactagatttactctctttttttttccttatgaaattccttgatactggtagtagtgagagataaacctaataattacatgccacatacctgtagattgtactatacttcaacacccttttgcaaatagtgagagataaacctaatacttacttacatgccacatcgtcagagcactcaattcttttttgttttggtaagcaatcagcttttgcctttacatagacaaaaattgatcgacgaatattttgaaaaaaaaaacctttgtatttatatggaaaagaaaatgcaaggtactttaccaaacaattgtgcatctatgatctatctgctatgtaggggttgataccggccttggttccttgctgcaccaactgttatttacctatctccatttttgttcttccagcaacaatagtatcaaaatactaaatgtctttcctgactaaggctaccttcataaatttacaggggtcattattctgctcgctatccaatccaatgcttctgaaaggtagcatggtttataagatgaaatccaagagagagatgctacagcaaagccaacagttgcccaatcagtatcatttcctttcatatatcaattcagctgtgcattattttgaggagaagcaaacaacatcatacagaaatactgacattgcaattgtcgggagggatgctgatttggatcatctcatggatcttttaatgcaaaacagcgctgaagagctttgtattatacccatagttgggcctgtaggttttggaaagacaagccttgcacagttagttttcaatgatacaagaacagaggtattcagctttaggatatgggttcatgtttccatgggtaatatcaaccttgaaaaaattgggagagatatagtttcacaaactacagaaaaaattgagggaaatatgcagctgcagtcaatcaagaatgctgttcagcgtgtgctaaataaatatagttgcttgatcataatagacagcctttggggaaaggatgaagaagtgaatgaattgaagcagatgttgcttacaggtagacacacagaaagcaagatcatagtgaccactcatagcaataaagtagctaagctgatttccaccgttccactgtacaagttggcagctttatctgaggatgattgtttaaaaatattctctcaaagggcaatgacaggtccgggtgacccgttgttcagggaatatggagaagaaatcgttagaaggtgtgaaggcacacccttggtagccaattttctcggttctgtggtgaatgctcaacgacaaaggcgtgagatttggcaagctgcaaaggatgaagaaatgtggaagatagaggaagattatccccaagacaaaatttcaccactatttccatcattcaagataatatattataatatgccccatgagctaagattatgctttgtatattgttcaatcttccctaaaggaactgttatagaaaagaagaaacttattcagcaatggattgcacttgacatgattgagtccaaacatggaaccttgccacttgatgtaactgcggagaaatatattgatgaacttaaagcaatctatttccttcaagttttagagcggtctcaggtaagttcatgggttgctttttaccttctgtacatatcctatgtaactagaatgtggttaaatatctccattaagcatagtagcttataccattgttttatttctaaattctcaataagtttctgtaagaagattgaccatgatagaatggccaatagtgatatctcaacaaacaagtaacactgttttcctccacagaatgatgcagaaagatccagtgcttctgaggaaatgcttcgcatgcataacttggctcatgatcttgctagatcggttgctggtgaagatatccttgttattttagatgccgagaatgagcgcaatgccagatattgcaattaccgttatgcacaggtgtctgcttctagtttagagtcaatcgatcgcaaggcatggccttccaaggcaaggtcactaattttcaagaatagtggtgtggactttgagcatgtcagtgaagttctttcagtgaacaaatacctgcgtgttttggatctcagtggatgttgtgttcaagatattccatctcctatctttcagctgaaacaattgagatacctcgacgtttcatctttatctattacagcactccctctgcaaattagtagctttcataagttacaaatgttggatctttcagaaactgaactaacagagttgccaccctttataagcaacttaaaaggactgaattatttgaatctccaaggttgccagaaacttcaacgattgaatagccttcatttgttgcatgatctacattacctaaacttgtcatgctgccctgaagttactagttttcctgaatctattgaaaatctgaccaaactccgtttcttgaatctttctggatgctctaagctttcaacattacctatcagatttttggaatcatttgctagcctctgttctttggtagatcttaacttaagtggctttgaattccaaatgttgcccgacttttttggcaacatatattcacttcagtatttaaatctgtcaaaatgtttgaaacttgaggtattaccacaatcttttggccaacttgcatatctgaaaagcctaaatctttcatattgttctgatcttaaactgctggaatcctttgaatgccttacctctcttcggtttttgaatctctcgaactgctctaggcttgaatatttgccatcatgctttgacaagcttaataatttagagtctctgaatttatcacaatgtcttggacttaaagcactacctgaatcacttcaaaaccttaaaaatcttcagcttgatgtttctgggtgtcaggattgtatagtacaatccttttctctaagtaccagaagttcccagtcctgccaacggtcggagaaagctgagcaggtcagatcaagaaacagtgaaatttcagagatcacttatgaggaacctgctgagattgaacttttaaagaataatccaagtaaagatttggcctccatctcacacctaaatgaggatagaattgaggagcctgaagttgtcactgaggtaaacttacattttattaaagaaataaaaacaatttgcctagtgtttcctttgaaatttccttatgtcaatacttaatttatctttgatagatttgagttactggtgattgagaaagttgtatgccaatttgaaccagtttctcactaccaactgaaaatgatgacgaacggaaactttattgtagttgtgctcgaattgaagatcccttttctaatgaggtgatctaattgggtaccagaacatgaatcatacttttttcagtagttcttaacatttcgtagagaaaatacatgagtgttccttcaattaaaaaactccctagaggccagcaagttataaatttaaatgggattctccttattacctagatttatgttttcagaaaattttgtaatatcatactaactaattgtccatgtccttgtttcttgatgtagccaagtgcaactagaggtatggtacaacagattccaggaaaccagctctcatcgccttcatctcatctttcttcctttgcatcaagctcagcgccatttgcatcctcctcttcggacacctcaacaagtgagcatccagtgcctaatgaagaggcggcaggtatggtacttcaaataattttctcccgatttaatcatctcaagatgaggttcacttctttatttgaatataccattataaggaaatagatcatgcgccctcttgtttaaaggaatttgatgtttttttatattcgctctctttgagatatacctgtcatccagcagtggtaaaaaggatagtatatagctgacaaatatgttcatataatttccttgtgggtaattttgatattctctttctatcttaatacgtgttatgagcaccggctaatgaccgaatggggtatgaatggaacaccggaggtcgaggcttttggcagcctcttcgacgtctggcccatgatcggcgacgaaagcaaaagcaggggatgagagagtagagaattggagacgagactatagattgaatcttgcttggttcattcatgatttcgtggcccttaattaggcttacgattgaactgaattagctaataaaaaaggataacaaagtcttctctaaatgtaagcaatcggatcactatcgctcgtccggcatgccgcgtcagttttcagctcgcgtgatctccttcgacgccgcttggaccggttgctgcatccgcgtagttgcgtttcttcatgtagacgattccgaccctttacattacaactacttggaattctttgagtgttctaaaataatttggatagtggtacatatgtggttacattttcttaatggtgacatatagccaagttggactaagattaattttaatttgtgtggaatgagaaagagtcaagacagtttgatacgtagaagtttgcatattcagaaccttatactggtttgtcttggtttattttcttgacaatgcagctttgacagttcctcggtccaaagagaaatgcgacaacactcccatgccggtaaaagatggcctgatatctgaagatgatgcaccggtacatctgcatcagaagcccctgcaggcgacagccatggcagccatatgactgacctgtaatcctacaagaaaccaactgaagattcatatgtggactgagtgaaattatgaaagttattggaataaattgttgctctgtatgtgagagcaagcttcagtccgttagcctggttccttttagtagtgttctactattgggagatcttcatcaacattttacatgaaacgtgatgtaatgaacctctgttaattgttaattgtcagagctctagttttttgtggtataaattttgttgcaagggggcaatgcactcaacttttgaatcatttgattggtatggaaatcattgcatttgtgcagagttcaggcagagttcagttcttgcatttgcacatcgtattactattacctggccttgtttggcacatctccagttccagctccacctctcctagagctggagctcagccaaacagtttcagctccaccgaaaatgggagcggagctgggtggagcactctaacaaaatgaactagagaggtggagctaggttaagctgttccacaactccacttcagatctaactcctaaagttaaatttaaaagttgaagctctaccaaacgagaaaacggacgatatgccactgtataggttgggttcgaatgaaatgccactcaatacaatgtatcggataaaatgccactcaatacgttgcctattggatgaaatgccac

SEQ ID NO: 407 - protein, 1388 aa, Malus X robusta
MGGEAFLVAFLQVLVDKLAHREVFKYFGLVKGVDQKLKKWSATLSAIGAVLNDAEERQLTAKNNTLKLWLEDLRDLAFDVEDVLDKYATKMLKRQIQHAHSRTTSKLWNSIPDGVFNFNMNSEIQKISERLQEISEQKDQLNLKIDTGALTTRARRNISPSSSQPDGPVIGRDEDKRKIVELLSKQEHRTVNFDVVAIVGMAGVGKTTLAGQVLNDMVATQTFQPAVWACVSDDFNLERVTKQILESITSRQCTTEDYNKVQDYLHKELAGKKFLIVLDDVWKTCSYGEWMKLQSPFRDGAQGSKIIVTTRDTDVSKMMGAATLVHNLEPMESSVCLQVFEQHAFLNSNDDKPPNYELLKEKIAAKCRGLPLAARTLGGVLLRKDTYEWEDILNNKLWSLSNEHDILPVLRLTYFYLPSHLKRCFAYCSILPNDYEFEEKQMILLWMAEGFILPRPEDKKQIEDLGADYFRDLVSRSLFQKSTKCISKYVMHDLIGDLARWAAGEICFRLEDKQNDDGEQLRCFPKARHSSYIRGLSDGVKRFEVFSELKYLRTFLPLRKDSFWNYLSRQVAFDLLPKLQYLRVLSFNCYKITELPDSIGDLRYLRYLDLSYTDITSLPKSTSTLYNLQTLILEGCSKLKALPIDMSNLVNLRHLNNSNVSLLEDMPPQLGRLVNLQSLTKFVVSGGGGGDRSGIRELEFLMHLRGTLCISRLENVTDVEDAQRANLNCKERLDSLVLEWSHSSDTRETESAVLDMLQPHTKLKELTIKSYAGKEFSSWVGVPLFSNMVLVRLEECNNCLSLPPLGKLPHLKELYIRGMNAVESVGAEFYGECSLPFPLLETLEFVDMQHWKVWLPFQTDHRGSVFPCLKTLLVRKCSKLEGKLPENLDSLASLEIVKCEELLVSIANYKQLRQLNIDGCKGVVHTAAKVEFELLESLYLSNISELTSLQTGELCRNGLNMVRDLKINGCEELTSSLKNEAILLQQLISLGRLEIEDNSLLVEELGKEADELLQLQILGCKLEFLKLKKCKNLLKLPEGLNQLSSLQELRIHECSSLVSFPDVGLPPSLKDIEITECHSLIYFAKSQIPQNLRRIQIRDCRSLRSLVDNEAVGSCSSSSHNCLEYLNIERCQSLTLLSLSDQLVRALRELDIYDCEQLEFLAPDGLFCNNTNYFLENFRIRRCQNLKSLPRLSGGIRGSNLREIRITDCDRLEALPEDMHNFNSLEKLIIDYREGLTCSFPANLTSLMIWKVKSCKSLWELEWGLHRLTSLRYLWIGGEDPDMVSFPPDMVRMETLLPKSLTELSIGGFPNLKKLSSKGFQFLTSLESLELWDCPKLASIPKEGLPLSLTELCIYGCPVLKERCQPGKGRYWHKISHIPYIDIDWKMI

SEQ ID NO: 408 - protein, 16 aa, synthetic construct
MWVLCLFCWPTYTHGS

SEQ ID NO: 409 - protein, 6 aa, synthetic construct
MHMYLK

SEQ ID NO: 410 - protein, 10 aa, synthetic construct
MSYKLHVVPW

SEQ ID NO: 411 - protein, 7 aa, synthetic construct
MSATPQV

SEQ ID NO: 412 - protein, 8 aa, synthetic construct
MRKHNWHI

SEQ ID NO: 413 - protein, 29 aa, synthetic construct
MRKHLQHTYILSFSLSLSLIPAQLCGRRE

SEQ ID NO: 414 - DNA, 66 bp, Dichanthelium oligosanthes
  source 1..66: mol_type = genomic DNA
aatttaactccgcctatgttgtctcaacatagccggtcccaagcccggataaaggaggagggggtt

SEQ ID NO: 415 - DNA, 61 bp, Solanum lycopersicum
  source 1..61: mol_type = genomic DNA
cttgtaactccgcctgtcaagtcacagccggtcccaagcccggaaaaaggaggagggcaag

SEQ ID NO: 416 - DNA, 52 bp, Sorghum bicolor
  source 1..52: mol_type = genomic DNA
tgcttaacactgccaatgccggtcccaagcccggataaaagtggagggggca

SEQ ID NO: 417 - DNA, 52 bp, Sorghum bicolor
  source 1..52: mol_type = genomic DNA
tgcctaacactgccaatgccggtcccaagcccggatagaagtggagggggca

SEQ ID NO: 418 - DNA, 52 bp, Sorghum bicolor
  source 1..52: mol_type = genomic DNA
tgcctaacactgccaatgccggtcccaagcccggataaaagtggagggggca

SEQ ID NO: 419 - DNA, 80 bp, Oryza sativa
  source 1..80: mol_type = genomic DNA
tatgtaactccgcctatgtcatcttaagtttatctaaatgatatagccggtcccaagcccggaaaaaggaggagggtata

SEQ ID NO: 420 - DNA, 43 bp, synthetic construct
  source 1..43: mol_type = other DNA
nnnnnnctgatgagtccgtgaggacgaaacgagtaagctcgtc

SEQ ID NO: 421 - DNA, 59 bp, synthetic construct
  source 1..59: mol_type = other DNA
acttgtccacaatcttttctgatgagtcgctgaaatgcgacgaaactcgatatgttcaa

SEQ ID NO: 422 - DNA, 171 bp, Bacillus subtilis
  source 1..171: mol_type = genomic DNA
cctataattatagcgcccgaactaagcgcccgaaaaaaggcttagttgacgaggatggaggttatcgaattttcggcggatgcctcccggctgattatgcagatcacagccgtaaggatttcttcaaaccaagggggtaactccttgaacaaagagaaatcacatgatctt

SEQ ID NO: 423 - DNA, 68 bp, Hepatitis delta virus
  source 1..68: mol_type = other DNA
ggccggcatggtcccagcctcctcgctggcgccggctgggcaacatgcttcggcatggcgaatgggac

SEQ ID NO: 424 - DNA, 186 bp, Otolemur garnettii
  source 1..186: mol_type = genomic DNA
ggcgctgtgtcgcaatctgcgaagggcgtcgtcggcccaagcggtagtaagcagggaactcacctccaatgaaacacattgtcgtagcagttgactactgttatgtgattggtagaggctaagtgacggtattggcgtaagccaataccgcagcacagcacaagcccgcttgcgagattacagcgc

SEQ ID NO: 425 - DNA, 52 bp, Chicory yellow mottle virus
  source 1..52: mol_type = other DNA
caacagcgaagcgcgccagggaaacacaccatgtgtggtatattatctggca

SEQ ID NO: 426 - DNA, 52 bp, Arabis mosaic virus
  source 1..52: mol_type = other DNA
caacagcgaagcggaacggcgaaacacaccttgtgtggtatattacccgttg

SEQ ID NO: 427 - DNA, 50 bp, Tobacco ringspot virus
  source 1..50: mol_type = other DNA
aaacagagaagtcaaccagagaaacacacgttgtggtatattacctggta

SEQ ID NO: 428 - DNA, 52 bp, Chicory yellow mottle virus; identical to SEQ ID NO: 425
  source 1..52: mol_type = other DNA

SEQ ID NO: 429 - DNA, 52 bp, Chicory yellow mottle virus; identical to SEQ ID NO: 425
  source 1..52: mol_type = other DNA

SEQ ID NO: 430 - DNA, 50 bp, Tobacco ringspot virus; identical to SEQ ID NO: 427
  source 1..50: mol_type = other DNA

SEQ ID NO: 431 - DNA, 68 bp, synthetic construct
  source 1..68: mol_type = other DNA
ggagagagaagtcaaccagagaaacacaccaacccattgcactccgggttggtggtatattacctggt

SEQ ID NO: 432 - DNA, 526 bp, Oryza sativa
  source 1..526: mol_type = genomic DNA
ctacggacttgattgtattgagccttggtatggaaacctgctaagtggcaacttccaaattcagagaaaccctggaattaaaaaaggggcaatcctgagccaaatccatgttttgagaaaacaagcggttctcgaactagaacccaaaggaaaaggataggtgcagagactcaatggaagctgttctaacgaatcgagttaattacgttgtgttgctagcggaactcccttctaaattagggaaagaagggctttcgaaatctaatacacacgtatagatactggcatagcaaacgattaatcacagaactcatatcataatataggttctttaattcttttttaaaatgaaaataggaatgattatgaaatagaaaattcataatttttttagaattgttgtgaatccattccaatcgaatattgagtaatcaaatccttcaattcatagttttcgaaatctttttaaaagcggattaatcggacgaggataaagagagagtcccattctacatgtcaatactga

SEQ ID NO: 433 - DNA, 526 bp, Oryza glaberrima; identical to SEQ ID NO: 432
  source 1..526: mol_type = genomic DNA

SEQ ID NO: 434 - DNA, 74 bp, Nicotiana sylvestris
  source 1..74: mol_type = genomic DNA
gaaagtcgtattcgatgaaagtcgtatgtacggcttggagggagatctttcatatatttcgagatccagcctac

SEQ ID NO: 435 - DNA, 130 bp, Solanum lycopersicum
  source 1..130: mol_type = genomic DNA
gagagccgtgtgatgggtgactatccagcacggttaagagagcacttttagtctgctctggtgaatggaagccccctatcatgcaataaggaagcagctcttctcacagcggagtcaccgttgactttat

SEQ ID NO: 436 - DNA, 77 bp, Hordeum vulgare
  source 1..77: mol_type = genomic DNA
gaaagccgtatgctttggaagaagcttgtacagtttgggaaggggttttttgagagaaaagaagaatctacttcaac

SEQ ID NO: 437 - DNA, 79 bp, Hordeum vulgare
  source 1..79: mol_type = genomic DNA
aggagctggatgagaagaaactctcatgtccagttttcgagtagagatggaactaagaaagagaaccatcgactataac

SEQ ID NO: 438 - DNA, 79 bp, Capsicum annuum
  source 1..79: mol_type = genomic DNA
aggagccgtgtgagatgaaagtctcatgcacggttttgaatgagagaaagaagtgaggaatcctcttttcgactctgac

SEQ ID NO: 439 - RNA, 43 nt, synthetic construct
  source 1..43: mol_type = other RNA
ccaatcgtggcgtgtcggcctgcttcggcaggcactggcgccg

SEQ ID NO: 440 - RNA, 49 nt, synthetic construct
  source 1..49: mol_type = other RNA
gagacggtcgggtccagatattcgtatctgtcgagtagagtgtgggctc

SEQ ID NO: 441 - RNA, 132 nt, synthetic construct
  source 1..132: mol_type = other RNA
gtgctcgcttcggcagcacatatactagtcgaccgccagatgccttgtaaccgaaagggggaagaggaaggaggtctgaggaggtcactttcccgaaaggatggcgtctagagcggacttcggtccgctttt

SEQ ID NO: 442 - RNA, 40 nt, synthetic construct
  source 1..40: mol_type = other RNA
ggcacgtacgaagggacggtgcggagaggagagtacgtgc

SEQ ID NO: 443 - RNA, 41 nt, synthetic construct
  source 1..41: mol_type = other RNA
ggcacgtacgaaggagaggagaggaagaggagagtacgtgc

SEQ ID NO: 444 - RNA, 46 nt, synthetic construct
  source 1..46: mol_type = other RNA
ggcacgtacgaaggaaggattggtatgtggtatattcgtacgtgcc

SEQ ID NO: 445 - RNA, 45 nt, synthetic construct
  source 1..45: mol_type = other RNA
ggcacgtacgaaggaaggtttggtatgtggtatattcgtacgtgc

SEQ ID NO: 446 - RNA, 42 nt, synthetic construct
  source 1..42: mol_type = other RNA
ggcacgtaccgagggagtggtgaggatgaggcgagtacgtgc

SEQ ID NO: 447 - RNA, 83 nt, synthetic construct
  source 1..83: mol_type = other RNA
gggaagatacaaggtgagcccaataatatggtttgggttaggataggaagtagagccttaaactctctaagcggtatcttccc

SEQ ID NO: 448 - RNA, 52 nt, synthetic construct
  source 1..52: mol_type = other RNA
ggctagctggaggggcgccagttcgctggtggttgggtgcggtcggctagcc

SEQ ID NO: 449 - RNA, 98 nt, synthetic construct
  source 1..98: mol_type = other RNA
gacgcaactgaatgaaatggtgaaggacgggtccaggtgtggctgcttcggcagtgcagcttgttgagtagagtgtgagctccgtaactagtcgcgtc

SEQ ID NO: 450 - RNA, 95 nt, synthetic construct
  source 1..95: mol_type = other RNA
gatgtaactgaatgaaatggtgaaggacgggtccagtaggctgcttcggcagcctacttgttgagtagagtgtgagctccgtaactagttacatc

SEQ ID NO: 451 - RNA, 100 nt, synthetic construct
  source 1..100: mol_type = other RNA
ggagacgcaactgaatgaaatggtgaaggagacggtcgggtccaggtgcacaaatgtggcctgttgagtagcgtgtgggctccgtaactagtcgcgtcac

SEQ ID NO: 452 - RNA, 57 nt, synthetic construct
  source 1..57: mol_type = other RNA
ggatgcgccttgaaaagcctgcttcggcagctggtgaatgacagctatggcgcatcc

SEQ ID NO: 453 - DNA, 44 bp, Pea early-browning virus
  source 1..44: mol_type = other DNA
attcaattaattcaatagaattaattctcgtattaatatgacaa

SEQ ID NO: 454 - DNA, 45 bp, Tobacco rattle virus
  source 1..45: mol_type = other DNA
attttatcactcttataagagtgatactcgtattaatatgaccaa

SEQ ID NO: 455 - DNA, 45 bp, Tobacco rattle virus
  source 1..45: mol_type = other DNA
attcaaagattacaatagtaatctctaccgtatttatttgacaaa

SEQ ID NO: 456 - DNA, 45 bp, Tobacco rattle virus; identical to SEQ ID NO: 455
  source 1..45: mol_type = other DNA

SEQ ID NO: 457 - DNA, 45 bp, Tobacco rattle virus
  source 1..45: mol_type = other DNA
attcggtagtgtgaaaacacattacctacgtattaatatgactaa

SEQ ID NO: 458 - DNA, 38 bp, Pea early-browning virus
  source 1..38: mol_type = other DNA
ttatggtctaagataattcttcagaccctcgtaatttt

SEQ ID NO: 459 - DNA, 38 bp, Pea early-browning virus
  source 1..38: mol_type = other DNA
cttaacaagaatcttatcaagattctgttcgtattcta

SEQ ID NO: 460 - DNA, 38 bp, Pea early-browning virus
  source 1..38: mol_type = other DNA
caaggtatatgcgaaacacgcgtaataccttcgtataa

SEQ ID NO: 461 - DNA, 211 bp, Tobacco mosaic virus
  source 1..211: mol_type = other DNA
gaaaaaagagtgatgtccgcaaagggaaaaatagtagtaatgatcggtcagtgccgaacaagaactatagaaatgttaaggattttggaggaatgagttttaaaaagaataatttaatcgatgatgattcggaggctactgtcgccgaatcggattcgttttaaatatgtcttacagtatcactactccatctcagttcgtgttcttgtca

SEQ ID NO: 462 - DNA, 135 bp, Tobacco mosaic virus
  source 1..135: mol_type = other DNA
ctttgtgatgttgctgtttcgttgaacaattgtgcgtattacacacagttggacgacgctgtatgggaggttcataagaccgcccctccaggttcgtttgtttataaaagtctggtgaagtatttgtctgataaa

SEQ ID NO: 463 - DNA, 43 bp, Cucumber mosaic virus
  source 1..43: mol_type = other DNA
ttctcatggatgcttctccgcgagattgcgttattgtctactg

SEQ ID NO: 464 - protein, 10 aa, synthetic construct
  VARIANT 2: note = X is R, G, or F
  VARIANT 3: note = X is Y or G
  VARIANT 4: note = X is A or F
  VARIANT 5: note = X is Y or V
  VARIANT 8: note = X is any amino acid
KXXXXILXFY

SEQ ID NO: 465 - protein, 9 aa, synthetic construct
  VARIANT 3: note = X is L or F
  VARIANT 4: note = X is Y or I
  VARIANT 7: note = X is any amino acid
IVXXVLXNL

SEQ ID NO: 466 - DNA, 82 bp, Nicotiana tabacum
  source 1..82: mol_type = genomic DNA
agacgcatccatggctgaatggttaaagcgcccaactcataattggcgaattcgtaggttcaattcctactggatgcaaaga

SEQ ID NO: 467 - DNA, 254 bp, Poinsettia latent virus
  source 1..254: mol_type = other DNA
aaagatatatatatctttattccccaaatctctcttaccagaaatcgtttggatctgtaagcgaggttatgcaaaacgtgaacattccagttggaatttgtaacaaccgcattgtctttcgatctctcggatttgccttaagcgaaaacaatttgactattgaagtcttgtccagaccaatcgaaagcttgggtcgagtattactctttctctatctctatccatcttttgcagcagattacgctcagagatat

SEQ ID NO: 468 - DNA, 73 bp, Poinsettia latent virus
  source 1..73: mol_type = other DNA
tggatagagtgtgatccccagtttaagaggtgctggggtgagtttagtgtacacgtaagcacctccacgaaag

SEQ ID NO: 469 - protein, 1098 aa, Poinsettia latent virus
MALLGIKLMTLVFAAWLSCCHSSSALPSSGLSGPCLNHSCLLRNSLNGASQWGTILHSPAVGSNCPPCPMMSIMGCSPPKPLQSNSYGVLCSTIASKAKQDLKLCWKEVQTHSEMYSKRISAALIDSLHQAVGMLLMIIIWIWSSIFLVVYHVLAYMITYHLSSAVCVGFLIFCTICAFRLISWICGDLLAFMFTGLTQLVNLVNQLSSRPSWRRYKNEKTVEGYKPFIIPQNPPKKSVIELSFSDGSHLGYATCVRLWDGSICLMTAKHCLVKEALLKGRVAGHSLPLKNFDLFLTCDEIDFSLLRGPKQWEAYLGVKGADLITSNRIGRSPVTFYNLSKDGEWLANSAQITGRHGKLCSVLSNTSPGDSGTPYYSGKNVVGIHKGTSELENYNLMIPIPNIPGLTSPDFKFETTNVRGNLYNDEDFRLSVGEDDKAEHWTDRLMKSITFKTKKWADWAEEESESDDERGKVVPPAKPSNYGEGCPPEHNQYLSDVGDLLTKVIGPEQNEKCVDILMGIMGVDKNEVAPHKEEKAEKGNRSSGFGHGKNRKGTNHPMRRGYNFRNCKKGGGQDESESHREISGRDPGRESNDKSPQEEAEEFERYFSSFYSWELHNSGEANSGFRPCGKIPKFYRPRKRRVSEWGQNLARKHSSLGEKTQGFGWPEAGAEAELRSLRLQAQRWLERSKSSVIPSAIERENVISRLVESYKICRSEAPLCSSGSDLSWKGFLEDFREAVSSLELDAGIGVPYIGYGYPTHRGWVENPRLLPVLSRLVYARLQRLATLSVDGKTPEELVRDGLVDPVRVFVKGEPHKQSKLDEGRYRLIMSVSLIDQLVARVLFQKQNKLELLLWRSIPSKPGFGLSTVEQVEEFIDHLARVVDVKSDDLLENWRELMVPTDCSGFDWSVSDWMLRDEMEVRNRLTINCNDLTRRLRNSWLYCLSNSVLALSDGSLLAQEVPGVQKSGSYNTSSTNSRIRVMAAYFAGASWAVAMGDDALESIDTTLAVYKSLGFKVEVSEDLEFCSHIFKTRSLAIPVNTSKMLYRLIYGYEPECGNLDVLRNYLCALASVLHELRHDQDLVQNLSKWLIPDGSQKIS

SEQ ID NO: 470 - DNA, 3297 bp, Poinsettia latent virus
  source 1..3297: mol_type = other DNA
atggcgctacttggaatcaagcttatgacattagtgttcgcagcttggctttcttgttgccattcctcttcagccctgccgtcgagtgggctgtcgggcccgtgtttaaatcattcgtgcctcttacggaactccttaaatggagcctcgcagtggggtactatcctacattccccggcagtaggcagcaattgccctccgtgccctatgatgtcaattatggggtgcagtccaccaaagccgctacagtcaaactcttacggcgtgctatgctcgacgattgcatccaaagcaaaacaagacttgaagctatgctggaaagaggtccagacacattcagaaatgtactcaaagcgcatatcagccgcattgatcgattcacttcatcaagcggttggcatgttgctgatgattatcatatggatttggtcctcgatatttctagtggtatatcacgtcctagcgtacatgataacatatcatttatccagcgcagtatgcgtaggatttctgatattctgtacgatttgtgcgttccggctcatttcttggatttgtggcgatttactggccttcatgtttactggattgacccaattggtaaatttagtgaatcagttgtccagcaggccttcatggaggagatacaagaatgagaaaactgtggaggggtacaaacctttcattataccccaaaatcccccaaagaagtcagtcatagaactttctttttccgatggtagtcacttgggctatgcaacctgtgttcgtttatgggatggatctatctgtctcatgaccgctaaacattgccttgtaaaagaggctttgttgaaaggacgcgtggccggtcattctcttcctttgaagaactttgacctctttttgacctgtgatgaaatcgatttttctttactccgtgggccgaaacagtgggaagcctacttgggagttaaaggtgcggatttgattacatctaaccgcattggacgctctcctgtaactttctataatttgtctaaagacggagaatggttggctaattctgcccagataaccgggaggcacgggaaactgtgctctgttttgtcaaacacttcccccggggactctggaactccgtattattcggggaagaatgtagtggggatccacaaggggacttctgaattggaaaattataatctaatgataccaattccgaatatccctggactcacctccccagattttaaatttgaaaccaccaatgttagaggtaatctctacaatgatgaggatttccgactcagcgtaggggaagatgataaagcagaacattggactgatcgtctgatgaaaagtatcaccttcaagactaaaaagtgggctgactgggcggaggaggaatctgaatctgatgatgaaaggggcaaggtagtaccccctgccaagccgtcaaactatggagaagggtgtccacctgaacataatcaatacttgagtgatgtaggcgatctgctcacgaaagttattggcccagaacaaaatgagaaatgtgtagacatactcatgggtattatgggcgtggataaaaatgaggtggccccccacaaggaagaaaaggcagaaaagggaaaccgaagcagtggtttcggccacggtaaaaaccgtaaaggaaccaaccacccaatgcgacgaggatataatttccgaaattgtaaaaagggtggtggacaagatgaatctgaaagccatagagaaatcagtggtagagatcctggccgagaaagcaatgacaaaagcccccaggaggaagcggaagaattcgaaagatacttctcgtccttctactcctgggagttacataattccggcgaagcgaactccggattcaggccctgtggaaaaatccctaaattctaccggccgcgcaaaagaagagtctccgagtggggccaaaaccttgccaggaaacattccagcctgggtgagaaaacccaaggtttcgggtggcccgaagcaggggcagaggccgaactaaggtctcttcgattgcaggcacagcggtggcttgaacgttccaagtcatccgttattcctagtgccatagagcgtgagaacgttatttctagactagtggagagctataaaatttgtcgatctgaagcgccactatgttcttctggcagtgacttgagttggaaaggttttcttgaagactttagagaagctgtcagttccttggagctggatgccgggataggtgtaccctatattggatatggatatccgactcatcgtggttgggttgaaaatcctaggttattaccggtcctttcacgcctagtgtatgctcgtttacagaggttagctacattaagcgttgatggcaagacccccgaggagcttgtaagagatggccttgtcgaccccgtaagggtgtttgtcaaaggtgaaccacacaagcagagcaagcttgatgagggtcgttaccgcctcattatgtctgtctctttgattgatcaactggtagcccgggttttatttcaaaaacagaataaattggagttgcttttgtggcgctccataccatcgaagcccggttttggcttatcaactgtagagcaagtggaagagtttatcgaccatcttgcgagggtagtggatgtgaaaagtgatgacctcctggaaaattggagagagcttatggtccccactgactgttctggtttcgactggtcagtctccgattggatgttgagagacgagatggaagtacgtaatcgtttaactattaattgcaatgatttaacgagacgattgcggaattcatggctttattgcctgtccaactcagttctagctttatctgacggatccctcctggctcaagaagttccaggggtgcagaagtccggcagttacaacactagttcaactaatagtagaattcgtgtgatggctgcttattttgctggagcatcttgggcggttgctatgggagatgatgccttagaatcaatcgacacgaccctagccgtgtataaaagtctaggctttaaagtcgaggtttctgaagatctggagttttgtagtcatatttttaaaactcggagcctcgccattccggttaatacatcgaaaatgctctaccgtttgatttacgggtatgagccggagtgtggaaatcttgacgtgttgcgcaattatctttgtgctttagcatctgtgcttcatgaattgcggcacgatcaggatttggttcaaaatttgtctaagtggcttattccagatgggtcacaaaagataagttag

SEQ ID NO: 471 - protein, 305 aa, Poinsettia latent virus
MAKKGVNKQARTNSKLDQLVTSLERLTVGSMQRKSNRQRPKSRKTSGRVVTAPVSSAALIRYKAPSLNGNSMDSVRLASKSLVIEAVKVGIDYQVSVVPLVPCIQHTWLSGVACNWSKYRWRSCRLVYIPYCSSSFTGYISMGLSYDYADAIPSDETEMSALKGYTTTSAWAGSEGIKMLSYPTGAVPSGAVVLSLDCASMSKPWYPYISAVAATNLGEKQPELLNQYTPARAFIGTGGGMQGVNGLTAGRVFMVYDIELIEPVSPAMQENLSSTGRSKIDQSISPLTGADFEIVRKVSAISQIQ

SEQ ID NO: 472 - DNA, 918 bp, Poinsettia latent virus
  source 1..918: mol_type = other DNA
atggctaagaagggagtgaacaaacaagccaggacaaatagtaagttagatcaactcgtcacctcactggagcgactaaccgtggggtccatgcagagaaagagtaaccggcaacggccaaaatctcgtaagacgtcgggacgagttgtgacagctcctgtttcgtcagctgcgcttatccgttataaagcaccttctttgaacggtaattctatggacagtgttcgtttagccagtaagtcactggttatcgaagctgtaaaggtgggtattgattatcaggtttcagtggttcctttagtaccttgtattcaacatacttggctctcgggggtcgcttgtaactggtctaagtaccggtggcgttcgtgccgtctggtatatatcccatactgttcatcgtcctttactggttacatatccatgggtttgtcttatgactatgcggacgctattcccagtgatgaaactgagatgagcgctctcaaaggatataccactacttcagcttgggctggtagtgagggcattaaaatgttgagttatcccactggtgctgttccgagtggggcggtcgttctgtctttggattgtgctagcatgtctaagccttggtatccttatatctcggctgttgctgcgaccaaccttggtgagaaacaacctgagttgttgaaccagtatactcctgctcgtgcctttatcggtactggtggtggtatgcaaggggttaatgggcttacagcagggcgagttttcatggtctatgatattgagctaatagaacccgtttcaccagccatgcaagagaacctttcttcgactggtagaagtaaaattgaccagagtatctcaccacttacgggagcggacttcgagattgtccgtaaggtttccgccatttctcagatccagtaa

SEQ ID NO: 473 - DNA, 2613 bp, synthetic construct
  source 1..2613: mol_type = other DNA
aaagatatatatatctttattccccaaatctctcttaccagaaatcgtttggatctgtaagcgaggttatgcaaaacgtgaacattccagttggaatttgtaacaaccgcattgtctttcgatctctcggatttgccttaagcgaaaacaatttgactattgaagtcttgtccagaccaatcgaaagcttgggtcgagtattactctttctctatctctatccatcttttgcagcagattacgctcagagatatgtatttttacaacaattaccaacaacaacaaacaacaaacaacattacaattactatttacaattacacacaaacacgtttttattccggctgtgtagtctttcaacgttgtcttccgatgcccgtgtttccaaacttcagccaagaaatcgtctaagcctaaccttttccaaatctcatactcgactgcacaatgaaattcgttctgtgatttgtcatacttggaaatgtctagctctaatatgtccataggaacattagagtccagatctgagaaaaattcttcgatctgtgtaggcgttttccttgtataaaacatgaatcttgaactgtcaattgtctctagcagctgtcttgttaattctgaaaatacaggaccaaaaagcgcattgattttcttgctatgatacacaatagtttgcaaagccgggtattcagtttgaatactaagatccaaacgctgtttcggctgctgcttgatcatgtgcctgtattgatcaacggctggtaaatcaataaagtcaaaatcagccaactggccaattgttgacttctcttgcttttcgatccatctttccaaactcgcccttgaaagcagaggtatattttttggttttttcttttctttaattaagtatgcatcaaaaaacttatctactactagagaagcggtgtcttcgatgtcaacaacccctactaattcgggagagttgaaatttcttttgatcatcgcgaccaaattttccaacaatccaggttttcgaggtttttcagcagcagtcctgatcacaggtttcaatgtcgtctcagattctctcggaagaggcaccgatttcgacatatccaacacacaatccttgacattcaaactattctctcgtatttgcatagttacagcatcatactcattgagtatagtactgtttcccggcaaacacttgtcgtaataatattgcatgtcagaaacatctcctgtttttggtgctgcgacgaaaaggttaacacctttgtacaccgattctatctgtaattgctattgagtcgacggtagtcaagatgcataataaataacggattgtgtccgtaatcacacgtggtgcgtacgataacgcatagtgtttttccctccacttaaatcgaagggttgtgtcttggatcgcgcgggtcaaatgtatatggttcatatacatccgcaggcacgtaataaagcgaggggttcgaatccccccgttacccccggtaggggcccaagcacaacatttcaaccagaaacactagccgaagcaaatccattccacaagcacctggtgggatcatctcatcatcagaaaccaagagagagattccgtgtccgcttgttgtagtagattgtgaggactgaggaccgagaagcagccatggctctagttgttaaaggaaaagtgaatatcaatgagtttatcgacctgacaaaaatggagaagatcttaccgtcgatgtttacccctgtaaagagtgttatgtgttccaaagttgataaaataatggttcatgagaatgagtcattgtcagaggtgaaccttcttaaaggagttaagcttattgatagtggatacgtctgtttagccggtttggtcgtcacgggcgagtggaacttgcctgacaattgcagaggaggtgtgagcgtgtgtctggtggacaaaaggatggaaagagccgacgaggccactctcggatcttactacacagcagctgcaaagaaaagatttcagttcaaggtcgttcccaattatgctataaccacccaggacgcgatgaaaaacgtctggcaagttttagttaatattagaaatgtgaagatgtcagcgggtttctgtccgctttctctggagtttgtgtcggtgtgtattgtttatagaaataatataaaattaggtttgagagagaagattacaaacgtgagagacggagggcccatggaacttacagaagaagtcgttgatgagttcatggaagatgtccctatgtcgatcaggcttgcaaagtttcgatctcgaaccggaaaaaagagtgatgtccgcaaagggaaaaatagtagtaatgatcggtcagtgccgaacaagaactatagaaatgttaaggattttggaggaatgagttttaaaaagaataatttaatcgatgatgattcggaggctactgtcgccgaatcggattcgttttaaagacgcatccatggctgaatggttaaagcgcccaactcataattggcgaattcgtaggttcaattcctactggatgcaaagatggatagagtgtgatccccagtttaagaggtgctggggtgagtttagtgtacacgtaagcacctccacgaaag

SEQ ID NO: 474 - DNA, 5266 bp, synthetic construct
  source 1..5266: mol_type = other DNA
aaagatatatatatctttattccccaaatctctcttaccagaaatcgtttggatctgtaagcgaggttatgcaaaacgtgaacattccagttggaatttgtaacaaccgcattgtctttcgatctctcggatttgccttaagcgaaaacaatttgactattgaagtcttgtccagaccaatcgaaagcttgggtcgagtattactctttctctatctctatccatcttttgcagcagattacgctcagagatatgtatttttacaacaattaccaacaacaacaaacaacaaacaacattacaattactatttacaattacaaagctgactatgtgatcttattaaaattaggttaaatttcgaggttaaaaatagttttaatattgctatagtcttagaggtcttgtatatttatacttaccacacaagatggaccggagcagccctccaatatctagtgtaccctcgtgctcgctcaaacattaagtggtgttgtgcgaaaagaatctcacttcaaatggcatcttcttcttcttcttctagatggagctatgatgttttcttaagttttagaggcgaagatactcgaaaaacgtttacaagtcacttatacgaagtcttgaatgataagggaataaaaacctttcaagatgataaaaggctagagtacggcgcaaccatcccaggtgaactctgtaaagctatagaagagtctcaatttgccattgttgttttctcagagaattatgcaacatcaaggtggtgtttgaatgaactagtgaagatcatggaatgcaaaactcgatttaagcaaactgttataccgatattctatgatgtggatccatcacatgttcggaaccaaaaggagagctttgcaaaagcctttgaagaacatgaaacaaagtataaggatgatgttgagggaatacaaagatggaggattgctttaaatgaagcggccaatctcaaaggctcctgtgataatcgtgacaagactgatgcagactgtattcgacagattgttgaccaaatctcatccaaattatgcaagatttctttatcttatttgcaaaacattgttggaatagatactcatttagagaaaatagaatccttactagagataggaatcaatggtgttcggattatggggatctggggaatggggggagtcggtaaaacaacaatagcaagagctatatttgatactcttttaggaagaatggatagttcctatcaatttgatggtgcttgtttccttaaggatattaaagaaaacaaacgtggaatgcattctttgcaaaatgcccttctctctgaacttttaagggaaaaagctaattacaataatgaggaggatggaaagcaccaaatggctagtagacttcgttcgaagaaggtcctaattgtgcttgatgatatagataataaagatcattatttggagtatttagcaggtgatcttgattggtttggtaatggtagtagaattattataacaactagagacaagcatttgatagagaagaatgatataatatatgaggtgactgcactacccgatcatgaatccattcaattgttcaaacaacatgctttcggaaaagaagttccaaatgagaattttgagaagctttcattagaggtagtaaattatgctaaaggccttcctttagccctcaaagtgtggggttctttgctgcataacctacgattaactgaatggaaaagtgctatagagcacatgaaaaataactcttattctggaattattgataagctcaaaataagttatgatggattagagcccaaacaacaagagatgtttttagatatagcatgcttcttgcgaggggaagaaaaagattacatcctacaaatccttgagagttgtcatattggagctgaatacgggttacgtattttaattgacaaatctcttgtgttcatctctgaatataatcaggttcaaatgcatgacttaatacaggatatgggtaaatatatagtgaattttcaaaaagatcccggagaacgtagcagattatggctcgccaaggaagtcgaagaagtgatgagcaacaacacagggaccatggcaatggaagcaatttgggtttcttcttattctagtactctacgctttagcaatcaggccgtgaaaaatatgaaaaggcttagggtatttaacatggggaggtcgtcgacacattatgccatcgattatctgcccaacaacttgcgttgttttgtttgcactaactatccttgggagtcatttccatctacatttgaactcaaaatgcttgttcacctccaactccgacacaattctctgcgtcatttatggacagaaacaaagcatttgccgtctctacggaggatagatctcagctggtctaaaagattgacgcgaacaccagatttcacggggatgccaaatttggagtatgtgaatttgtatcaatgtagtaatcttgaagaagttcaccattccctgggatgttgcagcaaagtcattggtttatatttgaatgattgtaaaagccttaagaggtttccatgtgttaacgtggaatctcttgaatatctgggtctaagaagttgcgatagtttagagaaattgccagaaatctacgggagaatgaagccggagatacagattcacatgcaaggctctgggataagggaactaccatcatctatttttcagtacaaaactcatgttaccaagctattgttgtggaatatgaaaaaccttgtagctcttccaagcagcatatgtaggttgaaaagtttggttagtctgagtgtgtcgggttgctcaaaacttgaaagcttgccagaagagataggggatttagacaacttacgggtgtttgatgccagtgatactctaattttacgacctccgtcttccatcatacgcttgaacaaacttataatcttgatgtttcgaggcttcaaagatggagtgcactttgagttccctcctgtggctgaaggattacactcattggaatatctgaatctcagttactgcaatctaatagatggaggacttccggaagagattggatccttatcctctttgaaaaagttggatctcagtagaaataattttgagcatttgccttcaagtatagcccaacttggtgctcttcaatccttagacttaaaagattgccagaggcttacacagctaccagaacttcccccagaattaaatgaattgcatgtagattgtcatatggctctgaaatttatccattatttagtaacaaagagaaagaaactacatagagtgaaacttgatgatgcacacaatgatactatgtacaatttgtttgcatataccatgtttcagaatatctcttccatgaggcatgacatctctgcttcagattccttgtcactaacagtatttaccggtcaaccgtatcctgaaaagatcccgagttggttccaccatcagggttgggatagtagtgtatcagtcaatttgcctgaaaattggtatatacctgataaattcttgggatttgctgtatgttactctcgtagcttaattgacacaacagctcacttgattcccgtatgtgatgacaagatgtcgcgcatgacccagaaacttgccttatcagaatgtgatacagaatcatccaactattcagaatgggatatacattttttctttgtaccttttgctggcttatgggatacatctaaggcaaatggaaaaacaccaaatgattatgggattattaggctatctttttctggagaagagaagatgtatggacttcgtttgttgtataaagaaggaccagaggttaatgccttgttacaaatgagggaaaatagcaatgaaccaacagaacattccactgggataaggaggactcaatataacaacagaacttccttttatgagctcatcaatgggtgaggtagtcaagatgcataataaataacggattgtgtccgtaatcacacgtggtgcgtacgataacgcatagtgtttttccctccacttaaatcgaagggttgtgtcttggatcgcgcgggtcaaatgtatatggttcatatacatccgcaggcacgtaataaagcgaggggttcgaatccccccgttacccccggtaggggcccaagcacaacatttcaaccagaaacactagccgaagcaaatccattccacaagcacctggtgggatcatctcatcatcagaaaccaagagagagattccgtgtccgcttgttgtagtagattgtgaggactgaggaccgagaagcagccatggctctagttgttaaaggaaaagtgaatatcaatgagtttatcgacctgacaaaaatggagaagatcttaccgtcgatgtttacccctgtaaagagtgttatgtgttccaaagttgataaaataatggttcatgagaatgagtcattgtcagaggtgaaccttcttaaaggagttaagcttattgatagtggatacgtctgtttagccggtttggtcgtcacgggcgagtggaacttgcctgacaattgcagaggaggtgtgagcgtgtgtctggtggacaaaaggatggaaagagccgacgaggccactctcggatcttactacacagcagctgcaaagaaaagatttcagttcaaggtcgttcccaattatgctataaccacccaggacgcgatgaaaaacgtctggcaagttttagttaatattagaaatgtgaagatgtcagcgggtttctgtccgctttctctggagtttgtgtcggtgtgtattgtttatagaaataatataaaattaggtttgagagagaagattacaaacgtgagagacggagggcccatggaacttacagaagaagtcgttgatgagttcatggaagatgtccctatgtcgatcaggcttgcaaagtttcgatctcgaaccggaaaaaagagtgatgtccgcaaagggaaaaatagtagtaatgatcggtcagtgccgaacaagaactatagaaatgttaaggattttggaggaatgagttttaaaaagaataatttaatcgatgatgattcggaggctactgtcgccgaatcggattcgttttaaagacgcatccatggctgaatggttaaagcgcccaactcataattggcgaattcgtaggttcaattcctactggatgcaaagatggatagagtgtgatccccagtttaagaggtgctggggtgagtttagtgtacacgtaagcacctccacgaaag

SEQ ID NO: 475 - DNA, 2341 bp, synthetic construct
  source 1..2341: mol_type = other DNA
aaagatatatatatctttattccccaaatctctcttaccagaaatcgtttggatctgtaagcgaggttatgcaaaacgtgaacattccagttggaatttgtaacaaccgcattgtctttcgatctctcggatttgccttaagcgaaaacaatttgactattgaagtcttgtccagaccaatcgaaagcttgggtcgagtattactctttctctatctctatccatcttttgcagcagattacgctcagagatatcacaaacacgtttttattccggctgtgtagtctttcaacgttgtcttccgatgcccgtgtttccaaacttcagccaagaaatcgtctaagcctaaccttttccaaatctcatactcgactgcacaatgaaattcgttctgtgatttgtcatacttggaaatgtctagctctaatatgtccataggaacattagagtccagatctgagaaaaattcttcgatctgtgtaggcgttttccttgtataaaacatgaatcttgaactgtcaattgtctctagcagctgtcttgttaattctgaaaatacaggaccaaaaagcgcattgattttcttgctatgatacacaatagtttgcaaagccgggtattcagtttgaatactaagatccaaacgctgtttcggctgctgcttgatcatgtgcctgtattgatcaacggctggtaaatcaataaagtcaaaatcagccaactggccaattgttgacttctcttgcttttcgatccatctttccaaactcgcccttgaaagcagaggtatattttttggttttttcttttctttaattaagtatgcatcaaaaaacttatctactactagagaagcggtgtcttcgatgtcaacaacccctactaattcgggagagttgaaatttcttttgatcatcgcgaccaaattttccaacaatccaggttttcgaggtttttcagcagcagtcctgatcacaggtttcaatgtcgtctcagattctctcggaagaggcaccgatttcgacatatccaacacacaatccttgacattcaaactattctctcgtatttgcatagttacagcatcatactcattgagtatagtactgtttcccggcaaacacttgtcgtaataatattgcatgtcagaaacatctcctgtttttggtgctgcgacgaaaaggttaacacctttgtacaccgattctatctgtaattgctattgagtcgacagcacaacatttcaaccagaaacactagccgaagcaaatccattccacaagcacctggtgggatcatctcatcatcagaaaccaagagagagattccgtgtccgcttgttgtagtagattgtgaggactgaggaccgagaagcagccatggctctagttgttaaaggaaaagtgaatatcaatgagtttatcgacctgacaaaaatggagaagatcttaccgtcgatgtttacccctgtaaagagtgttatgtgttccaaagttgataaaataatggttcatgagaatgagtcattgtcagaggtgaaccttcttaaaggagttaagcttattgatagtggatacgtctgtttagccggtttggtcgtcacgggcgagtggaacttgcctgacaattgcagaggaggtgtgagcgtgtgtctggtggacaaaaggatggaaagagccgacgaggccactctcggatcttactacacagcagctgcaaagaaaagatttcagttcaaggtcgttcccaattatgctataaccacccaggacgcgatgaaaaacgtctggcaagttttagttaatattagaaatgtgaagatgtcagcgggtttctgtccgctttctctggagtttgtgtcggtgtgtattgtttatagaaataatataaaattaggtttgagagagaagattacaaacgtgagagacggagggcccatggaacttacagaagaagtcgttgatgagttcatggaagatgtccctatgtcgatcaggcttgcaaagtttcgatctcgaaccggaaaaaagagtgatgtccgcaaagggaaaaatagtagtaatgatcggtcagtgccgaacaagaactatagaaatgttaaggattttggaggaatgagttttaaaaagaataatttaatcgatgatgattcggaggctactgtcgccgaatcggattcgttttaaagacgcatccatggctgaatggttaaagcgcccaactcataattggcgaattcgtaggttcaattcctactggatgcaaagatggatagagtgtgatccccagtttaagaggtgctggggtgagtttagtgtacacgtaagcacctccacgaaag

SEQ ID NO: 476 - DNA, 4994 bp, synthetic construct
  source 1..4994: mol_type = other DNA
aaagatatatatatctttattccccaaatctctcttaccagaaatcgtttggatctgtaagcgaggttatgcaaaacgtgaacattccagttggaatttgtaacaaccgcattgtctttcgatctctcggatttgccttaagcgaaaacaatttgactattgaagtcttgtccagaccaatcgaaagcttgggtcgagtattactctttctctatctctatccatcttttgcagcagattacgctcagagatataagctgactatgtgatcttattaaaattaggttaaatttcgaggttaaaaatagttttaatattgctatagtcttagaggtcttgtatatttatacttaccacacaagatggaccggagcagccctccaatatctagtgtaccctcgtgctcgctcaaacattaagtggtgttgtgcgaaaagaatctcacttcaaatggcatcttcttcttcttcttctagatggagctatgatgttttcttaagttttagaggcgaagatactcgaaaaacgtttacaagtcacttatacgaagtcttgaatgataagggaataaaaacctttcaagatgataaaaggctagagtacggcgcaaccatcccaggtgaactctgtaaagctatagaagagtctcaatttgccattgttgttttctcagagaattatgcaacatcaaggtggtgtttgaatgaactagtgaagatcatggaatgcaaaactcgatttaagcaaactgttataccgatattctatgatgtggatccatcacatgttcggaaccaaaaggagagctttgcaaaagcctttgaagaacatgaaacaaagtataaggatgatgttgagggaatacaaagatggaggattgctttaaatgaagcggccaatctcaaaggctcctgtgataatcgtgacaagactgatgcagactgtattcgacagattgttgaccaaatctcatccaaattatgcaagatttctttatcttatttgcaaaacattgttggaatagatactcatttagagaaaatagaatccttactagagataggaatcaatggtgttcggattatggggatctggggaatggggggagtcggtaaaacaacaatagcaagagctatatttgatactcttttaggaagaatggatagttcctatcaatttgatggtgcttgtttccttaaggatattaaagaaaacaaacgtggaatgcattctttgcaaaatgcccttctctctgaacttttaagggaaaaagctaattacaataatgaggaggatggaaagcaccaaatggctagtagacttcgttcgaagaaggtcctaattgtgcttgatgatatagataataaagatcattatttggagtatttagcaggtgatcttgattggtttggtaatggtagtagaattattataacaactagagacaagcatttgatagagaagaatgatataatatatgaggtgactgcactacccgatcatgaatccattcaattgttcaaacaacatgctttcggaaaagaagttccaaatgagaattttgagaagctttcattagaggtagtaaattatgctaaaggccttcctttagccctcaaagtgtggggttctttgctgcataacctacgattaactgaatggaaaagtgctatagagcacatgaaaaataactcttattctggaattattgataagctcaaaataagttatgatggattagagcccaaacaacaagagatgtttttagatatagcatgcttcttgcgaggggaagaaaaagattacatcctacaaatccttgagagttgtcatattggagctgaatacgggttacgtattttaattgacaaatctcttgtgttcatctctgaatataatcaggttcaaatgcatgacttaatacaggatatgggtaaatatatagtgaattttcaaaaagatcccggagaacgtagcagattatggctcgccaaggaagtcgaagaagtgatgagcaacaacacagggaccatggcaatggaagcaatttgggtttcttcttattctagtactctacgctttagcaatcaggccgtgaaaaatatgaaaaggcttagggtatttaacatggggaggtcgtcgacacattatgccatcgattatctgcccaacaacttgcgttgttttgtttgcactaactatccttgggagtcatttccatctacatttgaactcaaaatgcttgttcacctccaactccgacacaattctctgcgtcatttatggacagaaacaaagcatttgccgtctctacggaggatagatctcagctggtctaaaagattgacgcgaacaccagatttcacggggatgccaaatttggagtatgtgaatttgtatcaatgtagtaatcttgaagaagttcaccattccctgggatgttgcagcaaagtcattggtttatatttgaatgattgtaaaagccttaagaggtttccatgtgttaacgtggaatctcttgaatatctgggtctaagaagttgcgatagtttagagaaattgccagaaatctacgggagaatgaagccggagatacagattcacatgcaaggctctgggataagggaactaccatcatctatttttcagtacaaaactcatgttaccaagctattgttgtggaatatgaaaaaccttgtagctcttccaagcagcatatgtaggttgaaaagtttggttagtctgagtgtgtcgggttgctcaaaacttgaaagcttgccagaagagataggggatttagacaacttacgggtgtttgatgccagtgatactctaattttacgacctccgtcttccatcatacgcttgaacaaacttataatcttgatgtttcgaggcttcaaagatggagtgcactttgagttccctcctgtggctgaaggattacactcattggaatatctgaatctcagttactgcaatctaatagatggaggacttccggaagagattggatccttatcctctttgaaaaagttggatctcagtagaaataattttgagcatttgccttcaagtatagcccaacttggtgctcttcaatccttagacttaaaagattgccagaggcttacacagctaccagaacttcccccagaattaaatgaattgcatgtagattgtcatatggctctgaaatttatccattatttagtaacaaagagaaagaaactacatagagtgaaacttgatgatgcacacaatgatactatgtacaatttgtttgcatataccatgtttcagaatatctcttccatgaggcatgacatctctgcttcagattccttgtcactaacagtatttaccggtcaaccgtatcctgaaaagatcccgagttggttccaccatcagggttgggatagtagtgtatcagtcaatttgcctgaaaattggtatatacctgataaattcttgggatttgctgtatgttactctcgtagcttaattgacacaacagctcacttgattcccgtatgtgatgacaagatgtcgcgcatgacccagaaacttgccttatcagaatgtgatacagaatcatccaactattcagaatgggatatacattttttctttgtaccttttgctggcttatgggatacatctaaggcaaatggaaaaacaccaaatgattatgggattattaggctatctttttctggagaagagaagatgtatggacttcgtttgttgtataaagaaggaccagaggttaatgccttgttacaaatgagggaaaatagcaatgaaccaacagaacattccactgggataaggaggactcaatataacaacagaacttccttttatgagctcatcaatgggtgaagcacaacatttcaaccagaaacactagccgaagcaaatccattccacaagcacctggtgggatcatctcatcatcagaaaccaagagagagattccgtgtccgcttgttgtagtagattgtgaggactgaggaccgagaagcagccatggctctagttgttaaaggaaaagtgaatatcaatgagtttatcgacctgacaaaaatggagaagatcttaccgtcgatgtttacccctgtaaagagtgttatgtgttccaaagttgataaaataatggttcatgagaatgagtcattgtcagaggtgaaccttcttaaaggagttaagcttattgatagtggatacgtctgtttagccggtttggtcgtcacgggcgagtggaacttgcctgacaattgcagaggaggtgtgagcgtgtgtctggtggacaaaaggatggaaagagccgacgaggccactctcggatcttactacacagcagctgcaaagaaaagatttcagttcaaggtcgttcccaattatgctataaccacccaggacgcgatgaaaaacgtctggcaagttttagttaatattagaaatgtgaagatgtcagcgggtttctgtccgctttctctggagtttgtgtcggtgtgtattgtttatagaaataatataaaattaggtttgagagagaagattacaaacgtgagagacggagggcccatggaacttacagaagaagtcgttgatgagttcatggaagatgtccctatgtcgatcaggcttgcaaagtttcgatctcgaaccggaaaaaagagtgatgtccgcaaagggaaaaatagtagtaatgatcggtcagtgccgaacaagaactatagaaatgttaaggattttggaggaatgagttttaaaaagaataatttaatcgatgatgattcggaggctactgtcgccgaatcggattcgttttaaagacgcatccatggctgaatggttaaagcgcccaactcataattggcgaattcgtaggttcaattcctactggatgcaaagatggatagagtgtgatccccagtttaagaggtgctggggtgagtttagtgtacacgtaagcacctccacgaaag

SEQ ID NO: 477 - DNA, 1851 bp, synthetic construct
  source 1..1851: mol_type = other DNA
aaagatatatatatctttattccccaaatctctcttaccagaaatcgtttggatctgtaagcgaggttatgcaaaacgtgaacattccagttggaatttgtaacaaccgcattgtctttcgatctctcggatttgccttaagcgaaaacaatttgactattgaagtcttgtccagaccaatcgaaagcttgggtcgagtattactctttctctatctctatccatcttttgcagcagattacgctcagagatatatggtcggtatgggacaaaaggactcatacgtaggagatgaagcccaaagcaaaagaggtatcctcaccctgaaataccccatcgaacacggtatcatcaccaactgggatgacatggaaaagatctggcaccacaccttctacaacgaactccgtgtcgctccagaagaacacccagtccttctcactgaagctccactcaaccccaaagccaacagggagaagatgacccaaatcatgtttgagaccttcaacacacccgccatgtatgtagccatccaagctgtactctccttgtacgcttctggtcgtaccaccggtatcgtcttggactctggagatggtgtcacccacaccgtaccaatctacgaaggttacgctcttccccacgccatcctccgtttggacttggctggacgtgacttgaccgactacctcatgaaaatcctcaccgagaggggttactcattcaccaccacagctgaaagagcacaacatttcaaccagaaacactagccgaagcaaatccattccacaagcacctggtgggatcatctcatcatcagaaaccaagagagagattccgtgtccgcttgttgtagtagattgtgaggactgaggaccgagaagcagccatggctctagttgttaaaggaaaagtgaatatcaatgagtttatcgacctgacaaaaatggagaagatcttaccgtcgatgtttacccctgtaaagagtgttatgtgttccaaagttgataaaataatggttcatgagaatgagtcattgtcagaggtgaaccttcttaaaggagttaagcttattgatagtggatacgtctgtttagccggtttggtcgtcacgggcgagtggaacttgcctgacaattgcagaggaggtgtgagcgtgtgtctggtggacaaaaggatggaaagagccgacgaggccactctcggatcttactacacagcagctgcaaagaaaagatttcagttcaaggtcgttcccaattatgctataaccacccaggacgcgatgaaaaacgtctggcaagttttagttaatattagaaatgtgaagatgtcagcgggtttctgtccgctttctctggagtttgtgtcggtgtgtattgtttatagaaataatataaaattaggtttgagagagaagattacaaacgtgagagacggagggcccatggaacttacagaagaagtcgttgatgagttcatggaagatgtccctatgtcgatcaggcttgcaaagtttcgatctcgaaccggaaaaaagagtgatgtccgcaaagggaaaaatagtagtaatgatcggtcagtgccgaacaagaactatagaaatgttaaggattttggaggaatgagttttaaaaagaataatttaatcgatgatgattcggaggctactgtcgccgaatcggattcgttttaaagacgcatccatggctgaatggttaaagcgcccaactcataattggcgaattcgtaggttcaattcctactggatgcaaagatggatagagtgtgatccccagtttaagaggtgctggggtgagtttagtgtacacgtaagcacctccacgaaag

SEQ ID NO: 478 - DNA, 3929 bp, synthetic construct
  source 1..3929: mol_type = other DNA
aaagatatatatatctttattccccaaatctctcttaccagaaatcgtttggatctgtaagcgaggttatgcaaaacgtgaacattccagttggaatttgtaacaaccgcattgtctttcgatctctcggatttgccttaagcgaaaacaatttgactattgaagtcttgtccagaccaatcgaaagcttgggtcgagtattactctttctctatctctatccatcttttgcagcagattacgctcagagatataagctgactatgtgatcttattaaaattaggttaaatttcgaggttaaaaatagttttaatattgctatagtcttagaggtcttgtatatttatacttaccacacaagatggaccggagcagccctccaatatctagtgtaccctcgtgctcgctcaaacattaagtggtgttgtgcgaaaagaatctcacttcaaatgaacatgaataatactaaattaagcgcaagggccctaccgagtcttattgattattttaatggcatttatggatttgccactggtatcaaagacattatgaatatgatttttaaaacggatacaggtggtaatctaaccttagacgaaatcctaaagaatcagcagttactaaatgagatttctggtaaattggatggggtaaatgggagcttaaatgatcttatcgcacagggaaacttaaatacagaattatctaaggaaatcctaaaaattgcaaatgaacagaatcaagtcttaaatgatgttaataacaaactcgatgcgataaatacgatgcttcatatatatctacctaaaattacatctatgttaagtgatgtaatgaagcaaaattatgcgctaagtctgcaaatagaatacttaagtaagcaattgcaagaaatttctgataaattagatattattaacgtaaatgttcttattaactctacacttactgaaattacacctgcatatcaacggattaaatatgtgaatgaaaaatttgaagaattaacttttgctacagaaaccactttaaaagtaaaaaaggatagctcgcctgctgatattcttgatgagttaactgaattaactgaactagcgaaaagtgttacaaaaaatgacgttgatggttttgaattttaccttaatacattccacgatgtaatggtaggaaataatttactcgggcgttcagctttaaaaactgcttcagaattaattgctaaagaaaatgtgaaaacaagtggcagtgaagtaggaaatgtttataatttcttaattgtattaacagctctacaagcaaaagcttttcttactttaacaacatgccgaaaattattaggcttagcagatattgattatacttctattatgaatgaacatttaaataaggaaaaagaggaatttagagtaaacatccttcctacactttctaatactttttctaatcctaattatgcaaaagttaaaggaagtgatgaagatgcaaagatgattgtggaagctaaaccaggacatgcattggttgggtttgaaatgagcaatgattcaatcacagtattaaaagtatatgaggctaagctaaaacaaaattatcaagttgataaggattccttatcggaggttatttatggtgatatggataaattattgtgtccagatcaatctgaacaaatttattatacaaataatatagtatttccaaatgaatatgtaattactaaaattgattttactaagaaaatgaagactttaagatatgaggtaacagctaattcttatgattcttctacaggagaaattgacttaaataagaagaaagtagaatcaagtgaagcggagtataggacgttaagtgctaaagatgatggagtgtatatgccgttaggtgtcatcagtgaaacatttttgactccgattaatgggtttggcctccaagctgatgaaaattcaagattaattactttaacatgtaaatcatatttaagagaactactgttagcaacagacttaagcaataaagaaactaaattgatcgtcccgccaagtggttttattagtaatattgtagaaaatgggaacttagagggagaaaacttagagccgtggatagcaaataataagaatgcgtatgtagatcatacaggcggagtgaatggtactagagctttatatgttcataaggacggaggattttcacaatctattggagataagttaaaaccgaaaactgagtatgtaatccaatatactgttaaaggaaaaccttctattcatttaaaaaatgaaaatactggatatattcattatgaagatacaaataacaatttagaagattatcaaactattactaaacgttttactacaggaactgatttaaagggagtgtatttaattttaaaaagtcaaaatggagatgaagcctggggagataactttacaattttggaaattagtccttctgaaaagttattaagtccagaattaatcaatgtaaataattggattcgcacgggatcaactcatattagcggttatacactcactctctatcagggaggaggaggaaatctaaaacaaaaccttcaattagacagtttttcaacttatagagtgaatttttctgtgaccggagatgctaatgtaaggattagaaattctagggaagtgttatttgaaaaacgatatatgagcggtgctaaagatgtttctgaaattttcactacaaaattggggaaagataacttttatatagagctttctcaagggaataatttatatggtggtcctcttgtacatttttacgatgtctctattaagtaaagcacaacatttcaaccagaaacactagccgaagcaaatccattccacaagcacctggtgggatcatctcatcatcagaaaccaagagagagattccgtgtccgcttgttgtagtagattgtgaggactgaggaccgagaagcagccatggctctagttgttaaaggaaaagtgaatatcaatgagtttatcgacctgacaaaaatggagaagatcttaccgtcgatgtttacccctgtaaagagtgttatgtgttccaaagttgataaaataatggttcatgagaatgagtcattgtcagaggtgaaccttcttaaaggagttaagcttattgatagtggatacgtctgtttagccggtttggtcgtcacgggcgagtggaacttgcctgacaattgcagaggaggtgtgagcgtgtgtctggtggacaaaaggatggaaagagccgacgaggccactctcggatcttactacacagcagctgcaaagaaaagatttcagttcaaggtcgttcccaattatgctataaccacccaggacgcgatgaaaaacgtctggcaagttttagttaatattagaaatgtgaagatgtcagcgggtttctgtccgctttctctggagtttgtgtcggtgtgtattgtttatagaaataatataaaattaggtttgagagagaagattacaaacgtgagagacggagggcccatggaacttacagaagaagtcgttgatgagttcatggaagatgtccctatgtcgatcaggcttgcaaagtttcgatctcgaaccggaaaaaagagtgatgtccgcaaagggaaaaatagtagtaatgatcggtcagtgccgaacaagaactatagaaatgttaaggattttggaggaatgagttttaaaaagaataatttaatcgatgatgattcggaggctactgtcgccgaatcggattcgttttaaagacgcatccatggctgaatggttaaagcgcccaactcataattggcgaattcgtaggttcaattcctactggatgcaaagatggatagagtgtgatccccagtttaagaggtgctggggtgagtttagtgtacacgtaagcacctccacgaaag

SEQ ID NO: 479 - DNA, 1712 bp, synthetic construct
  source 1..1712: mol_type = other DNA
aaagatatatatatctttattccccaaatctctcttaccagaaatcgtttggatctgtaagcgaggttatgcaaaacgtgaacattccagttggaatttgtaacaaccgcattgtctttcgatctctcggatttgccttaagcgaaaacaatttgactattgaagtcttgtccagaccaatcgaaagcttgggtcgagtattactctttctctatctctatccatcttttgcagcagattacgctcagagatatactcttgagtactttcgccagctcacgttgacttttttcgctatcactcctttttagtgtcaaaacgtaggggtcttcgaaaatgttgagactttgcacaatctttctcaggctcgccacagttttcgtcacgatgatatttgactctggggtatagtagataatagatagaagtggtagctttactcgaaggcgaagatctgctcgatgtatttttggcgtgcagcaaatggcatccgatcctagagttctactggcttctgtcccaaatacaaatggcttccgaaagataggattgtcttttagaagcgggagcatttgaagataaagaggagtattgaatttcgggagcacaacatttcaaccagaaacactagccgaagcaaatccattccacaagcacctggtgggatcatctcatcatcagaaaccaagagagagattccgtgtccgcttgttgtagtagattgtgaggactgaggaccgagaagcagccatggctctagttgttaaaggaaaagtgaatatcaatgagtttatcgacctgacaaaaatggagaagatcttaccgtcgatgtttacccctgtaaagagtgttatgtgttccaaagttgataaaataatggttcatgagaatgagtcattgtcagaggtgaaccttcttaaaggagttaagcttattgatagtggatacgtctgtttagccggtttggtcgtcacgggcgagtggaacttgcctgacaattgcagaggaggtgtgagcgtgtgtctggtggacaaaaggatggaaagagccgacgaggccactctcggatcttactacacagcagctgcaaagaaaagatttcagttcaaggtcgttcccaattatgctataaccacccaggacgcgatgaaaaacgtctggcaagttttagttaatattagaaatgtgaagatgtcagcgggtttctgtccgctttctctggagtttgtgtcggtgtgtattgtttatagaaataatataaaattaggtttgagagagaagattacaaacgtgagagacggagggcccatggaacttacagaagaagtcgttgatgagttcatggaagatgtccctatgtcgatcaggcttgcaaagtttcgatctcgaaccggaaaaaagagtgatgtccgcaaagggaaaaatagtagtaatgatcggtcagtgccgaacaagaactatagaaatgttaaggattttggaggaatgagttttaaaaagaataatttaatcgatgatgattcggaggctactgtcgccgaatcggattcgttttaaagacgcatccatggctgaatggttaaagcgcccaactcataattggcgaattcgtaggttcaattcctactggatgcaaagatggatagagtgtgatccccagtttaagaggtgctggggtgagtttagtgtacacgtaagcacctccacgaaag

SEQ ID NO: 480 - DNA, 2120 bp, synthetic construct
  source 1..2120: mol_type = other DNA
aaagatatatatatctttattccccaaatctctcttaccagaaatcgtttggatctgtaagcgaggttatgcaaaacgtgaacattccagttggaatttgtaacaaccgcattgtctttcgatctctcggatttgccttaagcgaaaacaatttgactattgaagtcttgtccagaccaatcgaaagcttgggtcgagtattactctttctctatctctatccatcttttgcagcagattacgctcagagatataagctgactatgtgatcttattaaaattaggttaaatttcgaggttaaaaatagttttaatattgctatagtcttagaggtcttgtatatttatacttaccacacaagatggaccggagcagccctccaatatctagtgtaccctcgtgctcgctcaaacattaagtggtgttgtgcgaaaagaatctcacttcaaatgatgaatgctaatggatttagcggtgtggagaaagagtatataaggaaacatcatcttcatcagcctaaggagaatcaatgcagttcgtttttagtcaagcacattcgagcacctgttcatcttgtttggtcattggttaggcggtttgatcagccacaaaagtacaagccctttgttagcaggtgcatcgcgcaaggagatcttgagattggtagtcttagggaagttgatgtcaagtctggcctccctgcaacaacgagtaccgagagattggagcttcttgatgatgaagagcacattttgagtttcagaattattggcggggatcacagacttaggaactactcctcaatcatatctctccaccccgaggtgatcgatggaagacctgggaccttagtaattgaatcatttgtggtggacgtgccccaaggaaacaccaaagacgagacgtgttattttgttgaagcattgatcaattgcaacctaaaatcacttgctgatgtctcagagaggcttgctgtgcaggacaggacagaacccattgatcaggtctaaagcacaacatttcaaccagaaacactagccgaagcaaatccattccacaagcacctggtgggatcatctcatcatcagaaaccaagagagagattccgtgtccgcttgttgtagtagattgtgaggactgaggaccgagaagcagccatggctctagttgttaaaggaaaagtgaatatcaatgagtttatcgacctgacaaaaatggagaagatcttaccgtcgatgtttacccctgtaaagagtgttatgtgttccaaagttgataaaataatggttcatgagaatgagtcattgtcagaggtgaaccttcttaaaggagttaagcttattgatagtggatacgtctgtttagccggtttggtcgtcacgggcgagtggaacttgcctgacaattgcagaggaggtgtgagcgtgtgtctggtggacaaaaggatggaaagagccgacgaggccactctcggatcttactacacagcagctgcaaagaaaagatttcagttcaaggtcgttcccaattatgctataaccacccaggacgcgatgaaaaacgtctggcaagttttagttaatattagaaatgtgaagatgtcagcgggtttctgtccgctttctctggagtttgtgtcggtgtgtattgtttatagaaataatataaaattaggtttgagagagaagattacaaacgtgagagacggagggcccatggaacttacagaagaagtcgttgatgagttcatggaagatgtccctatgtcgatcaggcttgcaaagtttcgatctcgaaccggaaaaaagagtgatgtccgcaaagggaaaaatagtagtaatgatcggtcagtgccgaacaagaactatagaaatgttaaggattttggaggaatgagttttaaaaagaataatttaatcgatgatgattcggaggctactgtcgccgaatcggattcgttttaaagacgcatccatggctgaatggttaaagcgcccaactcataattggcgaattcgtaggttcaattcctactggatgcaaagatggatagagtgtgatccccagtttaagaggtgctggggtgagtttagtgtacacgtaagcacctccacgaaag

SEQ ID NO: 481 - DNA, 19296 bp, Citrus tristeza virus
  source 1..19296: mol_type = other DNA
aatttcacaaattcaacctgttcgcccagaaaatacgtctggcacaacagggatccggaataggtccagcctttaagctctaatattcccacaacaaaaattacactatgtcgaaactcagaggaagcttctggtcttcggccatcgctgttaacagcgattacacgatatcgcgcatctggcgcaaacttaacaccatagtagtcctgcactactttggttttgttagaatcaccaaggtgattcgtgacaaatcggctgatatgccgatagtccctttacggaaatctgtatttccgttttctgttcgcgcggctgtcacgagcttcgtgctgctgggcgtcctcttgacgctccgcattcagggtgcctctgtggccttcccgttatcaacgcatctggcgttgttcgtccccgctctgttcgcgggtttttcgaggttttctctgtgcaaacctccgctcacctctgccgctaagaggtccctccgtcaggcaaagcgggaatctgtttccctttctagccgggcctcttctcgcttctctagggaagtccctcgcggcacacgttcaagacttcacagacgtgtggtgagacgagctgacactgccccagttgagagtccccaagacaagcctacccgacgaaacagccgacttggtaagacttctcacctcccttacgtgggggaggcagcgttggatgatatccttcgctggatcgaagaggttaatcctcatccctcgatggtcgctattccagtgcccatcacttttggaaccatgcctgcaacggcttggtgttcccactctgaagccgcagttttgcgtgccgccttgactatcacgcggctgaaactgatttctccactcaggagaaacacgtacggtacgtctataatgacgtatcttctgccactaaccgtccccgtacggtttctccccgcaagtgcgtccatttttcccagtaaatctaaactgggcgttgaggtcccctctggtagggaccttcacactgcgttcgtgagatcttctcacgcgagcgctttcttctctgacgcggttcgcgcttcgtttgttccgtccagcgcggaacaattttttcacttccgtcgtcagcggacgcatgttcttgctattacagacccggtcctgtgtggtacggtgtctgttttaatgtcggacggtgttaacacagcacgtctcgacgttgttgctccggcgtactatgcgtacgctgaatctttgggcgccagagtgcgctttttgtgggagtcgtccgacgtggacgacgctaaagttcgtgacggtcaatgttatgtccgtcatgtgttcgacgtggctctctactttgggagacgcgccgacctttccgtgcgtagagcgctgggtatgtaccccacagtgggtgcactaaaggcttatcttgttcgcgaatacggtcgcgactctcttaaggttcctatgcgtgggacctacacttttggcagtgtgtttcactgcttgtcgctaaatcttcaagtcgacctgcgatctattcctaaccatcatttagttggtgggacgtctgcccacgtcttaattgggcaggttcgagtcagtgttcctggctcgattgttaaaccttcacgttcggccgttcgtaggcgtaatagacgcatgcgacgtgatggttttctcggtagttccggttcttcttcttctgcgggggagtcgactcgctgttcggactgctcttctcctcgcggtttaccttctccttccgttttaaaaccttccctaggtcggatcccgagtatagatcggcggttccggtttcctgcgggtacgcagttgcgcgtctccgtacctaggcgggtcgatgaccatgtttacgtgtcgactggtagcaacttcgatgagttgtgccatgcagttttgacacgtatgtcaaaaggtacaactctagaaatccttttacactcgattcgagagcggaagggactacttggttttgcggcgtgcttccgttgggggtcttcacacgtgtttgtaaagcgtggcaactttactgcccgatttcctatttcggcggtcaggtatgagaatcagtatgccgcggttatgatggatgtggggactagttgggttccgaagggctacgttcccgatgttgatgttgtgaaacgtcggagaagtcgtaatcgtcgttttcctctttcccatcgtgcggtggatcagtcggtccccgcgttacagtcgagtcctgtcgaggttgcttcggtttcgagtgataagccttcatcgtcgcagaaggcttcttcaccttctacttcttcttcttcttcttttaactcgacaaggagttcagactgggtgaatgtcggtttctctcatcgaactactaataaggttcgtgaaccgcgttatgctggtcatcgtaggatcggaaattttactttcccgaggggcacagtgtacaacacgcctgtcgatgagcgcgcctataaacgtgttcttagattgcgagataccacagcctgttcctttctccgtatactgctagctcgtttgtcgggttacagacctttaagtgacgagttctttaacaagtgtgtcacttcccggtttgtcgcgtgcattgaacctgtggaatcaggtctcgttaaggtgcatttccgttctgatgttttccgtgcctctttcccgtttgacggtcaacctatacaccccgccacggctttgacattggaagtggtggtctcttgggattggatggttacggcttttcagaatcccttgaaggatggatattgctacattcgccatttcgccgaagttagtttgagcatggggcgaattttcttcaggagggacgtcgacttgggacctttcccatacgttttcgaagtgcaacaccgtcttgaaaggttgtacgggaaagctgcgttaagatacggtgttaggggtcaatattcagccccgcgctgttttcactgttgctacaacgattcaccgagaccgatggcgtcctttaatgggtaccataagatgggtggtgaagataactccctgataatcacagacaccgacaggttgcgtgctgtggggagtgcctatgaaaaagtgaagagaaacataccagattcgttattggttcggtctgtagaaaaggaccttatagagtttaatcagactctagtcgacatgcatcgatccagaccgggcgttgtcgtacctttccaaatgagtgagaatcagcaagtgatgcttactagggcgtacccggaatttaatattaattttattcattccgtacattccgatcatccggtggcagcaggttctagggcgttggagaatcatctcgttcgtaaacacgctggtaccgattattcggatgtggggggttgtccgctgtttcatttacgtgcgggtcactccggcgttcacgtttgtagaccggtgtacgatgttaaagacgctcatcgtagagtagtccgtcatcaccaacttagtaaggtttcgctagatcagagtgacggtgttaaacaagttggctggaccgtaaacacgaattctgtatgcggtaacattttgggagagtgttatcatgcatcggaggcgatggttatggttcaagtttatgacgtaccgctacgtgagttgtgtagggctatgataaacaagaaaacttccgtgtgttatatgaccatggttacacctggtgagttgttggacgcccgcgagtccttttttattaaggacttggattgttcggttgagttagatcccattgcagacagggttgtttactgtttcaacaattctgcgtatacacacacgtactccactatatgtgagtgtatgcgaactccttgcttggtagtggacgggtttttgtttactatcgaaatggtatcgctcaggtgtagcgttaattactattgtatcaccaagtcgtcggtctgtccgagaattagtgagactaagcggttgcgctaccgtcggtgtgatagcgacttgattagaatcaaaattccccggtactccagtaagactcgtagttgtttacctgggtgttactatttgtacttggacgccaagtttgtaagtcgcgtgtacgagtacgtggtcaataactgcgttgtggtgaacgcgaaaacttttgagtggacttggaattacatcaaatcttgcaagtcgagagtggtgatcagcgggaagattatacaccgagacgaaccaatcgctttagagtacttagatgggttttctgcggttatgctgtccgctggcgtgaagggtaggcaaaacgcggacgtttctagacgcttagccgctttttcgggtgaaacttcgattttcgagttagtggggtttgctatatccgagaagtgccgcgacttgttcttgggtattcaggacgctgtggaaagatgcgtgaagtcgtacctcaggaattcgtttaatatgagtttcgtggacttgtccgaccccttacttacgattagcgaatattcagaattggacgttcctatcgacttaccgggtttcggtggaatagtggacggtaacgaaactagacttatggaagacggtgttaaatcggctttattacgtaaagcggttcaagccgaggctcagttgagtcttaagagaggcaatacttccgaaatcgttccgtgtgatgacgatgacgactcgaacggtgatgattcgcgtgtttcgctcgatacggactggtggttcgtccttcggggtggtagttctggcgggttgcgagctggagccgccccttctttgtttaggtgtttactcaggaaattgggtgggggtttatgtttggcaaagaaagtgttggaactgttagtcaagcgggtggttgaatcgttttctcgtttgaagcggaaaaccgctcgtttaacgtccttcgctaatttgttgcttgcgaggctctcttgcgggtttttcgatgacactgttttttctgcggtctgggaaatagcgatcaacctgaccaggatcgtcgatggagtagtcaagacaaaactggggtgctttcgtaatttatttcgattgattcccaagttatacgctggttgtaaggacgttgtgaaggacgttagtaacgcttacaggtcggttgtctcgttttccgctgaggttttgggtaagagttactctaaactttgtcagttttgcttggaaatatttgacatcgggcttattgaggtttctgctcgtaatttgggactggaaacatgcgtttcaatagcactagctatttttgatgtgttgattacttttcctttggggagcgttagttttcccgtcgtttgcgctagggttttcggtcgtctcgctatggaagtgggatcgaactttttgtttaagaaagttttcggtaaacccgaaactcttggtgaagatactttccgtaggactgtgagtatggttttgaggcccaaagcgtttgacaagctttccgtggatgcgaaaggtttagttaggtgctctggtgttattcctggagtgttaaggataatactatcttccttgttttccgaagatgacgcttgggtgggttatagtaaacatgaagtttcttcccttcctattgttaccttttgtgtgaagagattgtcttattctctggagcggtgtaaggaagcgtgtgtcgcatttattgttgactctgctaagaagattttgaaatctttaacttcagagttcaacgaatccattcaaaactccgacttgaccagtggtgctaagtccttgtacgggcacgtgagctcgatactttacacctctagtggtgtgattaataaagcaggaagcgccgtcgctactgttaaagcggtcgggagtgatatcagtggtcgtgtgaaacgtatgcgaccccgattttctctgtcccgtcactttgacgagcagactagtgagtactactctgctagcgattgttccgaactagatgagtcgttgtttagtgaaacgcctggtcttcgtggaaacgccaggtgtagagatttgtttcgtatcgtgtctagacgcgcggtagcgtgttgtgagtacgtgacaattcttttgaaacggctagcgtcgcgtgccggtgaatactcctactcgtatgtgatggatacgctcgtgagattgtatgtggcgaccgatgatgttgttagacggtgcaggtcctttacgttcgactgtactgataaagcatctaatttcgtcaccgggtttcttagttggcgcagcttacgttctggtgcgtactctgcaactccagggttgggtggtggtagtagaggtttaacgtcgttttctcacaccggtggattcacgcgcgttatcggcgctcttgggaacaccttatcggtggtgtttgatgaggaattcttcagaactttgctgcatcggttgagggcagatgttgtggttttactggtggagttcttgaaaaaccttcccgtttgtttgttttcaatatacacttttattgaatgtcggggtaggatctttcctttaagagagttcctatggggtttttgtcgtttcgtttgggatgttatcgaggggttgtccatcaatacttatcaatacctctctgctgtcgctgagaaagtgtatcgaggtgcctttaatcgtcgatttaacgaagaggatgagaggacgcttcgagtgatcacggaagcagagggaagaatcgaatttttgcgagttgttctcgcggaaatggaaaggttccgtgctgcgtcgaacgaggtttcttcgtcgaggtcgtctgatagtccttcattcccacctacttacggtgaaattgaggagttaaatgatgattcctccgatagtgcgctagtgataggcgtcgacaacggtaccggccgcactatcgttgacggtgagaccgattctgcgtccggtagcgatagtgacgtttctatcccgttggatcgcgattttgaacaaatcgggcgtcttggcggaaacggtaacgtcgatgtcgttcggctgggtttgaaattcgttctgaagttgttacgcaacctattcgatgctagaagttttaaagtgttgtatgggttgttacttcaaacccttttttatggtggttcggtaaataaatttgtgtgtcgtctggtctttagtcttgggacttgcttacctttcgagttactccgatttgcgtgttcagcgaggcggttgttgaagagtttggcatcatttgtttaccagactaaccttttcagcgaagttatggtggagcatttgtttagcgtttcccgactgctttatgattcccggtacttcgcgactgtgttttcggaattggagagacttaacttctatttagactatttcctttcgctcccgaagagatatctattccctaattctagggctcgtagttgtgctagggttccggttcccgtgattaggaccgaaggagtggcaccagtccgtgagagatcactaaatgacatactggactctttagactctttaaaggtgtcggacctcaaagggaagtcgacgttcgttgatgatggggagtcggattccggtagtgaacattcgggtagttcgatttcgttcggttccgtcaacgaagaagttttaaatgcggtaaatggtgacagcgtttgcgaaaaagccccgttgatgaagcatgttaccgcacttagcaggttggaacgccaccctagtggtcgtaaagacattcctgtttctaggaaaacttttgtgcgtggtgaatcttcgggtgtgaaatcgaaggtgagtatgtgcgattacttggtgaccttgaattcttcgtttggcacagtgcctgacatgtaccctgttgcgcgtgacataacgtataagaaactgactaacgccatgcgcgaattctattactcgcaaaaaataaccttgtacgaacttcacgggaagttgagttcctattgggacgagttgaaggtcgcaggtttcgatagaaagttaacgagaatggatttggacgatgatgtctatgttgttgactttaatcggaaattgttggtggggagaaacggatctcatccgtttcgtaatacgttaaagtcctattgttttatgttttgtaacgatgggttggttccttgcccgcgttctcagaaatatgattatgctttgatttctaatcaaacgtcttttgttgccgcgaattcgttcttacgtgccgtggatggtaaggatttgacttttaccaatgaggaacatagccttatcgtttatgaagctcctcccggtggtggtaagactcattctttggtgaattcgtacgcggattattgcgttaaagtatcttgtttagtagtgaccgctaacaagaattctcaaaccgagatatctcagcgcatatctaatgaattgatgggcaggaagctagctgctaagtatgttaccgatgcagcttccagagtgttcactgtagattcttacttaatgaatcacttgcgacttacgactcaactgctgtttatcgacgagtgcttcatggttcatgctggggcaattggagccgtggttgagttcacgtcttgtaaagcggtggttttctttggtgatagtaagcaaatccattacattcaccgaaacgatctcggggtttcctttgttgcagatattgatgcgtttattcaaccggaacatcgtatttacggcgaagtgtcctataggtgtccttgggacatttgcgagtggctttccgagttttacccgcgacacgtagctactgctaatgtagggagtattgggaagtcgagtgtgtcaatagaggaaatcaatgggtgcgatgacgtaccttacgacaaggcggcgaagtacattgtgtacactcaggctgaaaagaacgatttgcaaaaacacctcggtcgcttaaccgtgggtcggaacaaggtagtaccaattgtaaataccgttcatgaggtacaaggagagacctataaaagggtacgtctggtgaggtttaagtatcaggaggataccccgttctcttcaaagaatcatattgtggttgctttgactagacatgttgattctttggtttattccgtacttactagtaggaggtacgacgatactgcgactaacatagatagggcgaaggaaatttttgacaaatttcgttcgtcgaatcactcgtacggttcgtcatcgttagagtggtaccttgaaaagtatcctaccgaatataagggtagtaaagcatcctctgctccgataagttgcattaacgaatttcttaatgaggtcgtcgttggttcttctgtcgtgcagttgggtgatgtgtctgaagaactaagttcacgtccctttgaatcgggttgtgataatgttactgtaagagacaccgcccctcctgactcgggtaacttacacgaaccggctcgcgttcggcgtagtaaggtcacaagcaattcctccaagaaaagcgtcactgcaagaaaaccttctgtcgtacgaaagtcgtaattataactttatcaagacggaacggtttgttggaccaagcgaatttggtagggcgatggctgctgctgttatcgaacgttgtttcaaaatggaagagatggctaagataaggtgtgatattatatcccttactgaagctaacattttaaaatggctcgataagcgcactccctgtcaaataaaggccgtacacggggagttgaaacttcccttttcggtggaggagcaaatttccaacttcaaactgatggttaaacgtgatgctaaggtaaaacttgacgattcaagtctatctaaacatcccgctgctcagaacatcatgtttcataagaagtttatcaatgccatattttccccgtgtttcgacgagttcaaaaatagagtgttgtcctcgcttaatgacaatatcgtgttctttactgagatgacgaacgctgggttagcggaaattatcagaagaatcattggtgacgacgacaacttatttgttggggaagtggatttcagtaagttcgataagtctcaggatttgttcattaaagagtacgaacgtacgttgtattccgagtttgggttcgataccgaacttctcgatgtgtggatggaaggtgagtatcgcgctagagccaccacgctggacggtcagctgagtttttcagttgatggtcagcgtcgttctggaggttcaaacacttggattgggaattccttggttactctaggtatcctttcgttatattacgacgtttcgaagtttgacttactcctcgtttctggagacgattctttaatttattcgagtgaaaagataagcaacttttcttccgaaatttgcttagaaacaggttttgagactaagtttatgtctccgagcgtgccatatttttgctcaaagtttgtggttcagaccggtaacaaaacgtgttttgtgcctgacccttataaattattagtaaagttgggggctccacaaaataagttaaccgatgtcgagttatttgagttgttcacttcttttaaggacatgacgcaggactttggtgatcaagtggttttggagaagctgaagttgctagtcgaagctaagtacggtttcgctagtgggaccactatgccagcattgtgcgctattcattgtgtgcgatcgaactttctgtcctttgagaggttatttcctttcattaggggttggtatgttgttgacgctctaaaactcagacagcttaggaaactcactaatttgatctgtgaacgtgtagtttacgacaatcgggtgagttatttttcgtacttcgataacccgttcactaaacctgacgctaacgacgataacgtggacgacctcggacaagcgggtgaattagcaaccggctgatcgattgattagttctcgctgagagctaatgtgggtagttgagtcaggatgtttgccttcgcgagcgaaagccaagacttgttagaagaaaaagtttttcgtcgtagaacttaccatcgtaaatattttggtgacgtggttaaggacttcactatcgatattggttatgatactaccgatcgcgatcctactgtattggccgattatttctcattgtatttctttttacttaacaacgatagtgttgggcctatagcagcctcaattgtggtaagcccaccggttagcgggactcataaaattcgagcgcatatcgataatcaaccgaactgtgaaggtaacgtgacttacgttaaaaccttcgacaaaagtcgctttgtgattcgcgttaaagcgtccccgtctatgagaggttactactcttttcgggtgtttcttagtagcgatgtcgctagcgaacgcagcgagttcgtgtgcagttttgttggtagcaggtttctttgctgttgtacacaaacgatatctgaaaatttgagtaaagtttgttcatcttccttcttcttcagagcagtttcagaaaccgcgaccaacgaattttctgttgcgactgatgatgtggaagacgttaagtacataagaaaacaagccgagggtttttcacgttgcgctgacccataccctcctaggtgttatcgtagcactaatttgggcgattcttcaggggttcagagtcgtacgattgaagaggaaggttatatgacgggcactgcaggtaacgtcgcagtcaccgtcccgaatactccactagttagtgctgtctctccgtatatcgcagggtacaacgagaatgcacgctcgcgcgtctcattaatacgccgggtctgttgttacgccgtttgcgttttagtggtgtccgttcttataatgagcggtttattagccattatatttatatgatttagtgtagtaactcataaggtacaattacttacttaagactcgccgtttgactctgtttaaacggggtttaatggactgcgtaattcaagggtttttaactttcctagttggtatagctgtgttttgtgcctttgccggactgattatcattgttataacaatttatcggtgcacgattaagcccgtcagaagtgcttccccttacggcactcacgcgactgtctaagcggtatggtgcttttgggtttagacttcggtaccacgttttcaacggtggctatggctacaccttcagagttagttatactcaaacaatccaattcatcgtacatacctacgtgtttactcctgcatgcggaacctaacagcgtatcttatggttacgatgcggaatatttagcggcttctggggagtctggttcgttttacaaagatttgaagcggtgggttggttgcactgcgaagaactaccaaacctacttacacaaactatcaccttcctataaggtgatagtgaaagagtttggaactaagagcgtgccggtgccatatttgtcacctctgaataacgatttaggactcagcgtcgctttaccttcactgattgcttcgtatgccaaatccattctgtcggatgcggaacgagtgttcaatgtaagctgcactggagttatatgttcggtacctgctggttataacacgttacaacgagcttttacacagcagagcatatcgatgtcgggttactcttgtgtgtacattattaacgaaccttcagcagccgcgtactccactttacctaagttgaattcggcagataagtatttagccgtttacgacttcggcggtgggacttttgatgtctctatagttagcgttagattacccactttcgccgttagaagttcgagcggtgacatgaatttaggcggtagagatatcgacaaaaagttatccgataaaatatacgaaatggctgattttgtgccgcaaaaagaattgaacgtttctagtttaaaggaagctttatctcttcaaaccgatccggtcaaatatactgtgaatcattacggaatgagtgagaccgtatcaattgatcaaacggtgttgagggagatagcctcggtgttcataaatcgaacgatagatatacttacgcaagttaaggttaagtctagtatgcccgaatcgcaaagtttgaagttagtggtagtcggtggaagctcgtacctaccagggttgttggacgctttggcaaccgtgccttttgtgtctgggatagtgccggtggaagacgcaagaaccgctgtcgccacagggtgcgctttgtatagcgagtgcttagatggtaggtctaaggccctactaatagattgtattacgcatcatttgtcggtcacgacgtttagcgcggattcggtcgttgttgcagcggccggtagtccaattccttttgaaggtgaacaaaaactcacgttacgcaaatgcgttagtacgtctaactatcaagcaagaatgttcgaaggggattacgaaaaagttttccgaaatgaacgtatatacgcagcttcgatatcattgtttacattaggagttaattggagtgtgcctaacgacgttgagatgactctcgtgaccaaagtggactcgatgggtaaagtggaattttaccttaaaggtccatctggtgaactggttaacgtgcaaggtacttcgcattacgattatgctggtatgcctcaccccactagaaagctggtgaggcttagcgattacaatgtaaactccgccgctttagttttagctttgacattaactcgcgaaaaacgagaaaagttccttttgcgaacattatttgacactttactagcggatttacgaaagacagcaagtttaggcgagtactcaaagaagtacccgatcactcgaaacgatatcgatgtcgtctcatcacgtatggggatcgttgtttcgaaagttttacggggaagcgatttggaaagaatacctctctgaatcaactcgaaatttcgatgaaagaaatgtatcgttagaccacactttgagttcgggtgtggtcgtccgtaggcagagtcttttgaatgcgcctcaaggtactttcgagaacgagttagcgctattgtacaattcggtggtgattaacgattttgttgagttgactggtatgcccttgaaatctttgatgacaggtatcgaagaccgtaaggtacctgacgaattaatatccgttgacccgcacgaagtcggatgtagattcacgttaaacgacgtggaatcgtatctaatgagcaggggtgaagatttcgctgatctagcggcggtcgagcattcgtggtgtttgagcaactcttgtggtagactattaagttcgactgagatagatgcttacaaaaccttggtgtttactaagaattttgatagtaatgtatccggagtgactactaagttagagacttatctatcgtactgcatatcattgtacaagaaacattgcatgaaagacgatgattattttaatcttatcttacctatgtttaattgtttaatgaaagtgctggcgtcgcttggtttgttttatgagaaacatgccgacaatccgctactgaccggaatgctcatagagttttgcctagaaaataaggtgtattactctacttttaaagtgaatttagacaacgtcagattgtttaagtctaaagtgttgcctgtggtgttaacggtttgggatatatccgagcctgatgacccaatggatgaaagggtgctgattcctttcgatcctacggatttcgtgctcgatttacctaaattgaatatacacgatacaatggtggtggtgggtaatcaaatcagacagttagaatacgtagtcgaaagcgatgctttagacgatctatctcaacacgttgatttacgtttagcagcggacaatcccgatctacgcgttggtctgcgttgggcagggatgtttgtgtactacggtgtttatcggtgtgttgttgatagagcggtggaacgaccgacgttgtttagattgccgcagaaactactgagtcaggatgatggcgaatcgtgctcattacacatgggttccgtcgaagctttattcaatctggtgcagaaagtgaacaaggacataaacgttagacgtcagttcatgggacgtcatagtgaagtggctttgcgactgtatcgcaacttaggtttgaggtttccaccgatctcatcggttaggttaccggctcatcacggttatttatacgtcgatttttacaaaagagtacctgacggtgctgttaccgccgacgaactcgaaagtttacgtcaattacgctcatccgtggacgttatgtgtaaggacagggtgtcaatcacacctccaccattcaatcgacttagaagaggttcttctagaacatttagaggtcgaggcgcacgcggtgcgagctcgcgtcatatgagcagagacgtggcgacttccgggtttaatttaccttatcatggcaggttatacagtacttcctaaaaccgatgataaagaaatggatcctgtgagtgctgccgtgcccggtaagtatccggatgtcattgaaaagttcgtggccaataggtccgtagatgcgttaatagaaggcgttataagtaaattggataccaattcaatatacgaagattccactgaaaagtttactggtgaacacttgaaatacgttatggttactatggacactttcttattagaaaactacaaaacgaaaacggaagatctgttggttcacttaactatgatccaaaagaggttatacactatatccacgagcactaaaaccaagtttcgcgataaaggttgtattagttacgtacaagggggtttacgatataagttgttggacaaagtagtttttcctttcattatatcgaaatttaccgacagggagactccaaacgctctacgtaagtttgcttgcactttcgaggagttacacttgtgtatggctaggttaagacccgacttatacgaaaataaaaggacgaccagggctgggactccacatttaaagggctacctatcagctgactttctctcaggttctctccctgggtactccgaacatgaacgaggtatcattcttcgagcgtccgagtctatgttagctagacgtcaaggttacgaggaggcgaccgagcttcttaacctacgcgatttgggtaagtacttatagttggtttggggacggtaacattatactatcccatgagcgctgccttaagggtcgttaattgacgacttttgatatatttactaggtttgaattatggacgacgaaacaaagaaattgaagaacaaaaacaaggaaacaaaagaaggcgacgatgttgttgctgccgagtcttctttcagttccgtaaacttacacatcgatccgactttgataacgatgaacgatgtgcgtcagttgagtacccaacagaacgctgctttgaacagagacttattccttactttgaaagggaagcatcctaacttacctgataaagataaggactttcgcatagctatgatgttgtatcgtttagcagttaagagttcatcattacaaagcgatgacgacgccacgggtataacgtacactcgggagggtgttgaagtggatttgtctgacaaactttggactgacgtcgtgtttaactctaagggtattggtaaccgtactaacgcccttcgagtttggggtagaactaacgatgccctttacttagctttttgcagacagaatcgcaatttgagttatggcggacgtccgctagacgcagggattccggccgggtatcattacttgtgtgcggatttcttgactggggctggtttgactgatttagaatgtgctgtgtacatacaagctaaagaacaattattgaagaagcgaggggctgatgatgtcgtagttactaatgtcaggcagcttgggaaattcaacacacgttgatctgttgcgttccgattcccggtttctatcgggatggtggagtttcatcgtgaacgtgggtgatataatcgtccggttcgcgttacacgttcctaatgaagatatgctgaatagtttttcagctatatcgaattgtacgattatagcggacggtagtgctttactaaaagataatactgtggtcgatcgtttagaaggcatgaatcctttggcttatttattaaaattagcgaaaacgactactactatttgttttactatgtctaataaggttctttttggtactactaaatccgaaccacttagttgtttagctatcacgtcggatcgagttttattcaaagttgttatgggtactaacgttgacgattctcgatgcggctgcagtatttggttttacaacaacggtacgtttcaaaatggattgatccgttgtaataatctcgtcactttgtttagcgtgacttagacacgaagtgactgttcggattcaattgctgcaatgagcattcggcgctcgtggttaaaggttatggctgtagttacggtattatggtacggtaaagagccttccattagtgaaggttacaatgctctcatgaatgatgactttaagtttatcgatacgcattttacaaacgtttcttacgctaagaaatgttacgatttggctaatttcgatttagactttctacgcatcgttatcattcctttgagtgggggtacggtgaatgaatcgcgtgctgatcgcactaacgtttcagaaattgtcgaatcgcatgtgagcgaccgagacaggatgagcatcttgttgcgtaataagcggatccaaattccttcgctcttaccttgcgataactagagtctactcagtagtacgtctattagtataacgtattaagcactttagtaaagggttttgtttaaatcaaacaatatgcgagcttactttagtgttaatgattacataagccttttggctaaggtcagcgctgttgtggaacgtttatgcgatcccagcgtaactcttgcggaagtgatggacgaaattaatgactttaactcgtttctcgctttagtgcactctatgaagtcagacatgaacggagaccatcaggatggccaccacgagatgggtgaacacaagtctcggttgttatgcaacatagaggcgaaattgcgagtacttctcgacatcataagacgtcggttcactcgcgacaagctgctctgtactagcgcgacagatgtcatgggcttctttgtaatgaggtacatgagttctagccacaccagcttcgaatccgtaatgaggacggagttgaggttggtggttaaggcggtactgtcggatttatcccgcgcgcataaactggattttagcgagcgagcttttgcggcttatggtatccttttgcaaaagggtactgtgtcgaccgtttgcggtcagtttgacattaatttagtctctccatcttgcgtgtaggttaatacgcttctcagaacgtgtggttgtattaactaactttaattcgaacaaatatattgtgaaagtctgcgagttacaatggataatactagcggacaaactttcgtttctgtgaacctttctgacgaaagcaacacagcgaccactgacgtcgaacccgtgagttcggaagcggatcgcttggattttttacagaaaatgaatcccattattatcgatgctttgatacggaagaatagttatcagggcgctcgctttcgcgcgagaataataggagtgtgcgtggattgcggtagaaaacacgataaggggttgaagactgaacgtaagtgtaaggtcaacaatacgcagtctcagaacgaggtggcgcatatgttaatgcacgaccccgttaagtatttaaacaaaagaaaagctagagccttttctaatgcggagatatttgcgattgatttggttatgtacaccaaggaaaggcaattggctattgatttggccgctgaaagggagaaaacgagactggctcgtagacacccgatgcgttctccggaagaaactccggaatattataaattcggtaggactgctaaagcaatgttaccggacatcaacgccgtagacgttggtgataacgaggaaacttcgtcggagtatccagtgagtctgagtgtttctggcggagttctccgcgaacaccacttcatctgattgaagtggacggaataagttcctcgcggaactttgtgttgggttggtaaagacccttatgatggtgatatatcactagacaataaccggatgggtaaagtctttaaaatgatcgaggggaaaattaaccgtatcctctcgttggtctaagctcccacagagtggtagtggtctcaagtgaggcttaacgtatgcgtgaaccaaagaagttctccttagagtgtgtgttgtttacccaacgcactgtccctatggggggccaacataggtcca

SEQ ID NO: 482 - DNA, 3439 bp, Spinach latent virus
  source 1..3439: mol_type = other DNA
gtggtattgtgcattattattttaacgcacaacccggattaatcaggttttctgagtatatacccgttagtactcaatggatacaattgttcaaatgaaagtattgtgttacgagtcgatgatattattaatgataccttcagacgtaaacgcaccaaggccggaaactgccattggtaggttgatttccgatgccgctgtttcaggtgttttgcgacaatgcgatttcactgcagcggaagcctctcaatgttttgttccaattatcaccggaagatcagaatgcattgagacgcgattttctggaagagaaatacagtttcgcaatttttcgtattcctcacaatcattcgctgctgcgcatcgagtgtgtgaagcggattatatttatagtcgattccagacgagaaataccacgatcattgatattggaggaaatttttgcacccatagtaaaatgggtagagataatgttcattcatgttgcccgatattggacgttcgtgatggagctcggtatactgacaggttcatgtctgtggcgggggctttggaaacccagcctgaccgtgagctcagactgaactattgttccaataaatttgaagattgtgatgtttccgcaccatgggcgatggcgattcactcgatttcagatataccgatcacaagtgttgttaagcattgtttccgcagaggggtcaagaaattgatagcctctgtgatgatggatcccatgatgcttgttgcttctcaaggttttatgcccagattgaatgttcaatgggaaattgaacctgatgaggagaacaaaggttcccggcgaatttcttttcatttcgtcgatgctcctggattgtcatatactcataactatgacgtgcttatgcagtacatgacttgtaatcaagtcataatcagtgggaaagccgcgtatcgagttgagcgcgttgcagatctgtctggtgtttttattgttgagattaaccctggcggcaactgctggaatgaaagactggatctagttcccatgcgagatgtttcatgcgcgtggatgacttcgttaaaacgtaagaccttagtgcgggttgccatcccgcaatatattcattcatgggaagttaagtatgtgattgccgacactgattttgttagaagagttgctgaagtgtcgttccgtcagtataaaccagaaacaccattacaggatttggtgaaatctgttgcgacgatgatttcctctgcttctaaccattgcattatcaatggtgtcaccatgcaaactggtacaccgttggccattgaggactatgtcccaatggcggtgacttttgttgccttcgctaaatcaagatatgattcgataaaggaaggcatgaaaatggttaggcagagaggtactaatatcgcggatcctaatgatcattatgattatgagaaagatggatcggatgttaagagtttttcaaatcacataattcccatgaagaataccatcaagtctctgtttttccccatgaaagtgaagatgaatgataattctatgctcatttatagtcaaggaatcttgtcaactgttgttgatgagataaaaacactttttggatgggatgtttgggacactgacgatgcggtaatacagtctctgccctctttttataagatggaggatgtttttcaagttacgtctgaccactattgtttatcacatacattatctgtggattggtggttggagggactgtatgattcttaccatgacatgcgtgttgcgcataaaaagaaacttgatgaagaagaatctcggaagaccaaggtcgagaatgccttattgaaaattgctgaggttttggagaaacctgatgttagcgatggtcttaaagctctttcagaattgcccataatatcatcattattggagaagaagagcgaagaaatcgttacaaaacctcaatgcagggatactgaaaaaccccatattaatccctatgctgatgcaatcaaagaggcgcaggcctattacgaagagcttgaggtcgtaaatactcgcaatttgagaggtgttggtgattacctcttttggcgaaagaagtcgaactatgccagcgtttggggcgctgatgaatcgagagtggttcttgaacctatggcaaggaagttttactctcgagatagaaatgtttccatacccgagtatgagcgaggtatgacggttgatggtttcgtctccattaaatgggtggacggaaacattactgaggacacgtggaagtgtctttccaaatacgcagttgttttgctcgactcttcttgcgtgtttgatgccggttcacgtattatgccaggtctgaaaaaggcattggtaatggatgcaaatttcaaaatcgtgatcgaggatggtgtggcaggatgtgggaaaacaacatctctcctcaagcaagctaagccggattcggatttgttgttagctgccaaccgtgagactgcaaatgacgcaaaagccagcggcgttattcctaaagcgcttgaataccgagtgagaactgtggattcttacttgatgttgagaacgtggttcacagccgagagattgctcgttgatgaatgtttcttggtccatgctggcttggtctatgcagctgccaccttggcacgagtgaaggaagtaatagcttttggtgatacaaagcagattccattcgtgtctcgtataccaactgtcaaactcagacacgcgtctgttgttgggacgttgaagccaagaacaattacctacagatgccctagggacgtgacggcagtccttagtgagaaattttatggtactaaggttaagacgtttaatcttgttaaacagtctttggaattgaaaaacatagattctagtaccgaaatacctgtagaaaaggatacgctatatatagcgcatacccaagctgataaacatgctttgatgcgtttacctgggatgaatggtatagaagtgttaactactcatgaagcccaagggaaaacaagagaccatgtgatacttgtgcgtttaagtaaaactaccaatttattatattccgggaaaatgcccgatgctggtggttcgcacaatcttgttggtctgtcccggcataagaaatctttgagatattttagtgtctttgccgatgatccagacgatcaaattgcgactggaattcgctggtccaaaacattggatgagcaagagttagcagcttatagagctgctggttagtgttttatttataaaacctggttaagggtcctccgggatgtgctcagcacctagcctaagccaagtccatatgcccacctatgctgctccgggtggatgcttatacatgctatggatgcctacatttgaaataatgtagatgcctaatactctctctcagggagagagtttagatgcctccaaaggagatgc

SEQ ID NO: 483 - DNA, 2939 bp, Spinach latent virus
  source 1..2939: mol_type = other DNA
gtattgtgcagtattattttacgcacgacccggattaatcatttttgtgagaatatacccgatagctctcaatggattcttaccacttcttatctcagttgtgtgacttgaatgttctgactcatgcgctttatgttaatcaagtgtttgagattgtggatcagtccacaactagttatatgcagatgtggctttattcccgtgttattgtcccagttttgaaatatcatctcagtggagatattatattggataaattgcacgatgtgttccttggaacctttcgttcaatgatggtgccgatgattatgttgaaccgactttcattcgtcgtgaagatgacgacgatgaaccaccaccggaaagcgtatttgccgcttgaagaaagggaaaaaattcatgctgcgacgtttcttggtcatgatcattgggcaagcgttacttcgggatcatctttttatgatgatctcgaaattctcgctgatgagaccgtgaacgatgatttgcattttgataaagaatcttccatgccagatgagtatcagatcatgtggaatgatggtacaattgattccgtttggtctagtcagtttgaatgcgaagaaccaccgaaaccgaaatttataccacgcccttctgataaggtgtgtgatccagtggttattcaagatgccgtgaacgatatattcccatttcatcatgagatggatgatcgatatttccagacgttagtggagacacaggatatttcccttgaggtttcgaagtgttggatagatgcctccaatttcagagattttgttaagggtccaaattcttatgttgagcctgtgtttcaaaccggtgccactagtaagagagtgcatactcaacgtgaggctcttttagctgtgaagaaaaggaatatgaatataccggaattgcaatccactttcgatcttgatgcggaagtcaacacgtgtttcaaacggtttctcacacacgttgttgatttgccacgattaaaaaggttgcaacctatgactggtgttgaggtggaatacttcaatcaatacttgcttgggaagaatccacctgtgaaggaatatcaaggtcccttgacattgactgcacttgataaatatatgcatatggtcaagacgattgtgaaaccagtcgaggacaattcgttgaagcatgagcgacctttgtgtgccactattacctatcataagaagggtatagtgatgcaggcctcacctcggtttttgagtgctatgtcaagattggtttatgtcttgaaatcaaaaatccatattcccagtggtaagtggcatcaacttttcacgctggatgctggaaaatccgatgccgtaaaatggtttaaagaggtggatttttcaaagtttgacaagtctcagggcgagttacatcacaaagtgcaggagaagatatttaatgctttaaagttacctcccggatttgttgagatgtggttttccgcccatgagcgatcacacattgtggacagagaagcagggattggattttccgttgattatcaacggagaacaggagatgccaatacgtatttgggtaacactttggttactttgatttgtttggctagagtgtatgatttatgcaatcccaatattacctttgtcatcgcttcgggtgatgattctttaattggaagcgtcgaagaattaccgcgcggaccaggagaatttatttacaaccctgttaattttgaagcgaaattccctcataatcaaccatttatatggctcaaagttttagtaagtgttgatcttgaggatggtggaagagaagtgatcgctgttccaaaccctgcgaagttgttaattggtatgggaagacgagactgtcaataccaagctcttgatgatttgtatcaatcatggcttgatgtgatatattattttagagatgctcgcgtgtgtgaaaaagttgctgatttgtgcgcatatagacagacgcgaagaagctctatgtatttattaagcgctctgttgagcttgcctagttgttttgctaataagaagaaatttaagtggctctgttatcgtttaagagagcaagggtgtctgaagaaggatatttatcctgtagcaaaacctataagtgcccataatataaggaaagaagattcaaatggatgcgatgttaatcaaggaacagatgattcgttctcacggaaaaagaatcgtggatgctgggagtatgtcccaaagatgttgcagactgatgtgtctgttcctgttactgataaatctttccacagtaacagaggctcgtcggtttccccaaccgattgcggtgatggagggtgctccagatccgccagctcgattggtagtaaaaataccaaacctcgccatagatttcgagctgcaggagttcaccaacccagcggtcgtgatccagaccgtataccgccgaatcatcgacgaagtgcctaaaggttggtatggtttaaagtcctggtcttcctccaattatggagacgttgtggccggactaaaaagggctgcacgagttaaagtgcatttttctataccgggttcagattgggcttataccttaaatctgtccgaagtggtatctgggttagcactccccaaattaccaattcccgagaaatatctcaggatgccgattgctatcacaatcgatgataccgtcaataaaattggcgatggttttgatgatgtaccatctccatggtacttgtatcaatgatgtgttcctttcatggaacctagtgaggggccctccggggtgtgctcagcacctagcctaagctaagtccatatgcccacctacgctgctccgggtggatgcttatacatgctatggatgcctacatttgaaataatgtagatgcctaatactctctctcagggagagagtttagatgcctccaaaggagatgc

SEQ ID NO: 484 - DNA, 2735 bp, Olive latent virus 2
  source 1..2735: mol_type = other DNA
gatatttcgcactcctagtgaatcttcctagtatatccgttgaaaaaacgagagtgcaacaacaaaaactacagagttctttttttttaaaaaaaaaaaaaaatcaaagagacatggccggagtactttatgatgaggagtacgttccccaggaaccggattacttgtattgcccgtacgagtgggagggtgaagatcctacccaatgcgatgcaaatgttccgtccgtcagctaccttgtggaggctgtaaaaaaatcctttactgagggtaaccacgatatgctgatttcttgcgagtcgtaccacgccgagtgttgcgagggtcccttgatgaacaagggtttgaccctctcgacttactttatgagttatccgggcatttcattacctgcgttcggcggtggtgtgattcatgtcacttcagctcgcgtctgcatgcaagctttttatgccgtgaccccaggaaggtgtagttgttcgtgtggtacgcaattcatctatcgtgccaaaggtggaactggtctaacatttgacgccacgaacactatttctagtgcctttaagttcgaagacgggaaagtgaaatggttaacagaagacctaggcttggcattattggctggttgtttcttgaaatacgtgccaatacctcatgagattgaaattaagatcgaaagaaaggtcgagcccgtgtctgctctggatttttgggaaccagaaggattgatttctgacgtacatttcgtacatccgcaagagagagccttggctcctgagcctccaatggatgtagagatggtgagattagtccgtacggaattgtttgaacactttaatcccacccttcttctgaacgctcggtcggatttttccggtgagaaactgaaagaggttgagttgccacgagctcaatcggaacccttagtccctagggtctgtctcccgcgaggtgatgacgctttaattgatcagtttttcatagacaaggcacccgagcattttaatcgtgaacctgccacagatcaatggcaggtggaatctgatgactttactgtggatttccccacccaagtgcgattacgcgaacgggacgaagattggttcagaaggaaacccgatttcgctgtgtcgtccattcgtacaggtctcgagatgcctcgaattgctacaaagaaggaaatgttaatggcattctcgaagagaaacgttggagctcctcagatggtagaggtacctcaggagatccacgtgaagaggttggctgataggttcttccggacattcttgaaagaaggcggctgggataagggggatggtcattattgggatgattttttccatagaaagggtcgaaaggtcttttcattggagaattgttacgatgaccccttgtcctcatacttagttatgctgaagtccgctgggaaattctctctagatctgaactttccggttcgatcggtaccccaaaccattacttatcatgagaagtgggttaccgaggttttttcccccatgtttctgcaggtgatggcaagatttttctctcgtctgcaagattgggttgttgttccggctggtccgatggctgacttctcccgtgtttggcctagctttgaggggaagtgtttaacagaaattgatctgagtaaatttgataaatctcaaggtaagctgttgcatgatgtgcagagggagattttcctccgtctgggtttcccacccatttggtgtgattggtggtttaaattccacgagtcttcctatttaaatgataagaaccttggtatagctttctcagtagattaccaacgtagaacaggcaatactgccacttactttgggaacacgttggtaacaatgattatgatggccgaagtgtatgaacttgattctctccctttctgtggtttgttttcgggtgatgacaacttgatcgtgactgatcgacctcttgaaggtcgagtttcgttattcccgaacatgttcaacatggaggccaaggtgatgcgtccgggtcagaattacatgtgtagcaaatacctttgcactgtagacggtcgcgtaacccctgtccctgatccttttaagttgctgaagaaagctggtgcctcgtgtcctttggagcaccttgatgacttttacgaatcgtttctggattataccaaatacctggtgagggatgaagttagaacattaatacccaggttgatggcccacaggtatcaagtctcgatggatgaagctggagttgctcttgatcagattatgagctggcgaaagtcaaagactcaattctttaagcatttccagtacaggaaaccaatcaaggactcgctcgaggctgtgaaatccgacttcctttctgctttcggaaaagtagatgatcgaataagagtttggcgcgggcgtcgaaccaatcataagaaggaggtcgatgctttaaaggtcccattggtgagttttagggagtgatggtggctcgcctagagcggtgtgctggtttctacctaaggaaccaggagagtggagtgacttggtcatgacaagtcgagtagtactttaactacgagtcgtcgttgagacgccggtccccttccaaggggatcgagagggttttcccggtactttacccgggattcgaattgagctgtctttgacagagctcaaactcctcgctagatactctaacgagtgtcttgaggactctcctatggagagtcagtaaagacc

SEQ ID NO: 485 - DNA, 7531 bp, Citrus yellow vein clearing virus
  source 1..7531: mol_type = other DNA
gaaaagcaaacattatcatacacaccccaaaaattgtgatcatcgtctctgcatcaacagctcagctaagaaccagagaaatggccactattaggggtgccatcgaacgcattacagacaccaccgtacgcactacacttcaagaggaggcatgccgccaaatacgcgctgaacttaaaaacgtcgaacacatcaaccgttacgctatacagcctgacgccgccgacgcactcgaacacctaggcattggttctaaccccttctctgtggcactgcacacacacggtgcctgcaaagcgattgagaaccaattactctatgtagttggtaccttactcccaaaagaacgtgtcaccatgctcttccttaagaaaagcaagctcaacatcatgaaacgctgccctaaattccaagacatcttcctgaaccaacatattgaaccacgcgacgtttctaggtactgcgactttaacgtccaatccacctccaccagcatacccacacgaacggcttacatcagtgacacactccactttatggaccgtagagacctagtccgactattcctaaacagcccaaatctagagactctctacgccaccattgttctcccagtcgaggctgcttacaaacaaccgagccgctacccagagatataccagattaactatgacttcgacggtttccagtacatacctggaggccatgggggcggcgcctaccaccacgagttcgaacagctgcaatggttagacactggccatatccactggcgtgggcccgactgtaaagagattcgcatgacaattaccgcccaaatgctcgaaagcttaggtgcgaatcatcttttctgcttcaaacgtgggaaactactcaccccacgtgtacgcactttcggccgagatacccaagtgctcttgcccaaaatcttccgcccggccgacaaaaactttaacagggcaataccactaaccctagctaacaaactactcctgtacgctaaatccattaacacagtgaccttccgcgacgtcgttgccaagacacgccaacttatgaaggacaaggagcttgaaacatacaccggcaacgacctgttgcatatggccaactatttcttcgctgttggagcactgtcaggagttaactcctatgaccaattgcttggcctatccgcctgggaagcctgcaccgtccgtatcaagaacaccataacaaatctctgggaaaagattgccggaaagaaagagttcggcaagctattggaggcccttgagtgggaaacattcacatactcacgtcaagtgaccgaattcaccgttacgggactgcccgccctgctccccctcccagacatctcagaccaagaagagattttcgcccagcaggacgagttagacaaaatcactgccggcgctaccaagatacggactattgacattatgcggggacaagctaaccgcgctaacccaaaaactccgatcaactcaacaccggcccagggaccccaactgcccgatacccccgacccaatcgaccaagctgcctccaaagacctcgtcaccaagcttcagaaaaacaaacgcatttacatccaagacgacgggccggaataccttatgggacacatggctgaagtccctgcctggtatcttgaacaagatgataccaccactagactcaaaaaccgctgcgcttggttcttcggcccacccacctacagatatgggcacaacgacattgagtacaccaccatagaatactacccttgggtcgagcgtattggagccattttcggcaagtacaacacctgtcttgctcaaacttacgacgccggagcccgtattggataccacgctgacgacgaagactgctacgaccccgacgtcaccgtggtcaccatcaacctcactgggaacgccaccttcctgctcaagaccccaaccggcactaggacctggaaacttaaacctggtgacttcattatcatgaaacccggtgcccaaaggtgcacaaaacatgccattagagattgcacaactaaccgcacatccttaaccttcagatggcaggcccgcacttgccccactaacctcagaaagatcactaacctacccaaagccaccaaccaaccccaaaccactgaatggcgtcctgtaactaaaccacgccctagcaccaccgcttccagcgacacccagaccccacttgtcatagaccaggaacgagggtataccaccacctccgacgtgacaccaacgattaggctgcccgccgaaaatggtaataacaccggtgctggaccctcctccgcattaaccctcgccgacctgaatgataaccaagcgccgaccactaacaaaggaaaagagaaacttgaggaaatggtcgaaactggcccaactatcatggaacgcttcctcaacaccgttcaggaaccaacacaagatttatgggactccgcctctgaatccgccgcgagctacctcgctgaaggcctcggcatctctgccatccaagcactcccttgggcacctcacttggaactcatcaatgcattaggcttccagggcactgaaaggcaatacggcccagacaactgtctcatatggcctatcacgcattacagagaattgcccagaagcaacaatgtcgaagcccctccggaagtgcttgagctgctcgactgcatcaatagataccccactgacgtcccaatgctcaaaactcgagccgccgccttcggttcagacgtcaagaatctacgcataggggcacttgttaagaaccaggacaaacagtggcgcgcatcactcgcactactttgtgaggaaaatgaacacctcctccctaccactgtaatacacggcgctggtggctccgggaaatcccacttactccaacagtgggtggcgtctactgagcgcggaaatgtagtcaccatcttgcccactatcgaactccttcgagactggcaaaacaaatgtccacatgcaccgaaagagactttcaaaaccttcgagaaagcgctcatccagaacagcgcccccgtggttatcatggacgactactctaaacttcccccagggtatattgaagcctacgtcagcctcaagggccagtgcaaacttctcatactcactggagatcctagacagagccactaccatgaggagaaccctgaggccttaatctctactcttgaccccgccacggactactttggcaaattttgcgcatacaacatcaacgccactcatagaaatgccaaaaccttcgccaatgcgcttggggtgtactctgaaaaagaaatccccaccaccatcacctgctcatcctaccagaaaagcggttggccaacacttgtcccatccatccttaaaagaactgcgctcaacgacatggggcagcgctcactaacctacgcaggctgtcagggactcaccaccccaaaagtgcagatagttcttgacaacgccacaccactatgctctgacaaggtcatgtacaccgcactatctagagcggtggaccaaattcacttcttcaacactggcccaaatcacactgattactgggaaaagatgaacgccacacctttcctcaaaactttcatcgaccacacacgtgaggagaccttcgctgagcaccaacctgccgaacccacagtgcgtgagtacgcaccagcaacgcatttcccaccggctaacgagaacctagcactagagccgtgggtcgaaccgctgactgataaacactcgcgggaactcttccactctgccttaggccacagcaactgcgtccagactgaaaacaccgtagtccaactttttccccaccaacaggccaaagacgaaacgctcttctggaaaacaatagatgccagaatcaagataaccaccccagaagagaacatcagggcttgcagcatagccactgacattggcgacatcttgttcctaaattacaaagaagccatgggtttaccacaagaccccatacccttcgaacaggcactctgggactcttgtcaagccgaggtgcaactaacctacctcagcaagcctctggctgcactcgcaaatgccgcccaaagacaagaccccgactttgactccaacaaaatccaactcttcctgaaatcacaatgggtcaagaaagtcgagaagatgggctgccttaggatcaaacccggccaaactattgcttccttcatgcaacagactgtcatgctatacggaactatggctcggtacatgcgccgcatccgcacctcactttgcccacccgaaattatgatcaactgcgagaccaacccaaaccaaatcggaacatgggtgcgtgagtattggaacttcaacacccagagccatgagaatgactttgaagcgttcgaccaatcccaagacgccaacatgttacaattcgagctcattaaggccaaataccactcaatccccgaggagatcatcgccgggtatcgacacctgaaatgcaacgcccacatcttccttgggactatatcgatcatgaggttgtctggtgaagggccgacctttgacgccaacacagagtgctccattgcatacaaccacacaaggtactttgtgccgaaaggcaccgcccagctctacgccggagacgactctgcatgcgcgtcgcccctctctgaaaaacccagcttccaacatatctcaccagagctcagcctcaagtctaaggccaagattagaacccaacagaaaggagactttgcgaccttctgtggctggctcatcactccaaaaggcctgatcaaaaaccccacccagctttacgcctcctggttattggctaagcacaacaaagatctcgcggacgtggccagaaactatgccttggacttacgcattgcctatcaacttaaagacgagctctatgagttattatcacctgaagaacttgaccaccaccaactgctcgtccgagagatgatcaagcacaaaatgggccatctcctcaacctccctgaggggtttaaaacaaactaactcgaaatggacttacctgagctcctgctatccaaaaacttcattcgcacccggttacccctcgccaaacccattgtcatacacgctgttgccggcgccggcaagacacaacttcttgaagaattcgcgcggtcctcaccctcaaccaaaatctactcacctgtgaaacatcactccaactcactgctgctctcgcccttccacaaagctctctctgaagcttccattgtcgacgagtaccctctaagccagatacacgagaacgtcgagtacatctttgctgaccccatccaataccttggtaatccaaaccttagaaaaccccactacatctgcgcgtcttcccatcgatttggccattccaccgccgctctcctaacaaaacttggcattgaaacttacgcacataaagaagataccgtccgggtagacaatatcttccaggctgaaccagacggccaaatcatcgcctgcgaccgacccactcaagagctggctgccaaacacacactagactacctgaggccctgcgaaagcataggactaactttcccacgaaccacgatcctgatctctcacgaacttactgcagacaccctcaccaaagagatttacatcggtttgacccgccactctaaccaccttctcatactcactccggatgcctctacaacctcctcctgaccacacttgggctttccgactactagctcttggcgccgccttagcactgctcactttcacgctcaaccgagacacaagtcgtcacgtcggagatccttctcactcacttccttttggagggtactacagagacggcagcaaagtagtccattataactccccgagagccacaaaacctagcaccccttccttcctgtacctggccccaatcttactgatcctactaattcatgcagtcaatagatttactaatcctcgccattcttgttcttgcactcattgccagcctattccccgcacctgaaccttgcacaattgtagtctctggcgcctcagcctccgtaactaactgcccaaaccccgaacaacttgcagagctagtcagagcgcttaaaccggctaaaccggtttaaaacttaacacaaactcgaactcatgagcttcgactacactcaccctctctaccgcagctatccatttccacactactgcgagttcgaccggcaccaactctgcgaccatcatccagtactcaaacctccaactcacaaacccagcgccccgaactctctcatgtctaccaacgacaacaagggcaaagaaccacttcacccgacaccttcgggccctaacgacacgaccccgaaacctatccccgtacccactccctcagttacgcccacagctgcaggtaaggaaaaccaagaacccatcgaaaagcgtatcacacacgctttccacgctgaagcaaaaacccacaacaatggggtctctccacctgcctttaacccgaacaacatgaatgctgtgccgctgaacctgctcaacctcaacctaagatactcaccggtcactaactccatagctaaccctaaacagactgaggctatcgggaaagcttgggtccgcatcttgaacatcgatcctgccaacgtgttcttatacgccatcgacctcgccagagcttgcgccgacgcgggctcttcccctgaagctgatattattggagcgaacgaagatctcaaccccgttgttgaacgaaacgcattggccctagtggttagggatttctgcccgctgcgcgctttttgcgcttactactctcgggtggtatggaacctcatgatcaaggcggaccagcctccggccaactggatgaaatccggggtagacgagaacgcgaaattcgcggcattcgacttcttccatggtatcctctcgcccgcttccctgtatgtgcccctagagagacaccctacttccgcggagaggatcgcaaatcaggccatgttcgctgtgaaaattgccaacgctccaggaaatggcacggacctcacgatggaccacgttgccttcaccaaaggaaggactacccagcactccggcctccgcccgacccctttcaacatctaaccacctttgaaccaatactcctagcatgcctacaagcccttaaaccacttccccccgaaatccaaatagctatcatttcgtgtgtgtgtgacttctttaatttcttacgctgtgccagtagcaagtaccagggcaccagccgctcagctgttaaacgtcgagcggcccgcctgaactactgctacaagtgtgggcaccccttatatctaaataaacctcacccctgccgaccaggtcaattgtgctctgcatctatctccgagcgcctctgtttgctccacacaggaccgattaggtttctaaccgaaaatcctgttagtgccagagcagctcacttcctagcgcacgagctccttgaccccagatgaaacataaatattcaggctttcagtttccattttctg

SEQ ID NO: 486 - DNA, 7890 bp, Potato latent virus
  source 1..7890: mol_type = other DNA
tcggataaaccaaaccaacaatatttacacatactcaagttaaacatacactgttcaatcttgcgtacgttattatggctttgacttacagaagtccattggaagatattgttggtgcatttgaaccaagtgttcaaacagctattgcgaacacagctgctaaccactacaagcagcttgaggaagagaagggaatcttatttaattatgcattgccacctgaggccaaacagaggttaataggcgctggcatatatttaagtcccttttccgctgttccacattcgcatcctgtgtgtaaaattttagaaaatcatctgttgtatgtagagcttcctagtagactagataattcttttatgtttgtaggtattaaaaactttaagttggatctgctcaagcgcagacatgcaaatctaagcatgatccaaactatcaatagatatgtttgtagtttagataaaataaggtacggttcaaatttcgtagttagatctagcgctagttatccagagctttgcagacgcaaaggtgagcttgacggagcagtgttgagggaattggtgcctgagttgatgattaaaagcgctaagaatctattcttgcacgatgagcttcattattggacccatcgggatctgattaccttcttggaggtactgaagccagacaaactgttgggcaccttagtttacccacctgaattgctaaagggtgcgaagaaaagtttgaactcttggtgctacacatatagagtggacaaagacaaattgtttttttatccagatggcgtccattctgaaggctacgagcaaccattgagtggcggttacctcctcgaaacaagtaggattaccacacgtgatggtgaagtttattgcgtcgatgttgtgtgcagtaaattcgcgcatcatttgattgcaataacccgtggtgatctgattgtacccacacaacgcagttttgctccctttgaggccataactagtaaaggtttgaataacttggtgaggggcaaggtggaatgtttccccgtatgcgcaagtgtagtgtctaaattgtataggtatttgcgcacactcaaaaaacccgatgagcaatcagcaatggccaaattgagccaacttcaggcaaatcccactggggaagagatacatttcatccagggctttgccaaattggtgataaatacaaacaaaatcgacagtttaatcaactgcgatagtattaaggtgttcatgggcaaattgtttggtccgttgcccaattggcttaccaagagattgaggagcgtgcaagaggtgtctctcgatgaatttgtccattactttgaaccatatgtcgtcaacgtgcccactaagcatgtgaactatggttttgagttcaattacgtaatggaagatttcaggtacgagcagggtgagaatgatctagtggatatgctagacaattttgatggctccacaaagatgagcacaagcctttgcatgatgaccccatacgtcggcttagcaccattgaccacgcgacgcaaattcctatgccatatcgaggagaattccatattcagagtggtgtctaggaacatcttttgtagctacacaaatagttacaaagtggccgtgagcactgagggggtggttcggatacttgagatttatagcaaagtgtctgtggatctactgggagcgtatttgggaaaattgctcaagaaaacagagttcatagagagagtgcgatcaagggttaaggcaattgccataaagcacctcaagtacacttggcaacaggttggtctagcttggttcaccagtggaaggcgtggctacacaaaatacattgattgcagcccatacacgatgaataccttcaaagagcttaaagagagatggggtgtgattgtgcgtgaattgtctaaacagcaggacaacgctgaagctgcgaaaaacatacctgagcaggaaattcaaacgaccagcaaaccaagttgtgtggagaagcgaaattacttctcgaacactttgatgactagctttgctgcgtcaggagtgaaaggcaaggaacaggtgagctccgaaattgccaagggtaggggtgaaaggagcgaattgagggcaactaaattgatgggctcatgcagcaccctcggcaaagtggctcacatagcatcaagaaaaggctccatgggggtattggaatgtgtagcgagggtcatcaaattggatttccaaaccgccttgaagttccttagagtcaagggtgtgtggatgcaggagtatgagagcataggcgagttggaggaggagcagatacagagtcctgcatatgatttttgtgctgcgatcgcaatgaccttcaatgttgaaattgaattgacgttcccaggctcagagcttgtttaccacttcgctgcaagttcaactgtgagttgtatccgcttgagcatttgggaaggcgtagtcacactgatgagggctgaaaatgattgcgttatcactgcatgtgcacaagctttagctagggagcctgaggatgtagtgaaggtgctcaaagatagattggaggagagcatactggaagagatttggaacggcgaaggggtgcctttcgagagaatgtatctcttctttgaagctctggatattcaagcacattgcaatcgcgatggtgcacagctagtgttgaatggcgggggcaagctggcgcgatgtttcgtgattaaagaagatcacatcgagttcgcaggtgagaaaaaggtcagtagagtacttgagctccaggatgctagaacaagtagtaaagcagacccagaattggtcaaggagtttcagaaagccgggactgtggtagaatatgtagcagtgcaatccagagcgcaagtcctggcgaagagtctagtggatgcaaccactggggtgtgcagctcaaccatattcaatgactgtgagagcttggaacgttcctttagattcaccgaaagcgaactagcgcgaaatgtttgttgtgttatcggtacgtttggggctgggaagagtaccctgttcaaggatatgatgaggcagtgcctagggaaaggtgttcactacgcatcacctaggaaggtgttggcgaatgagctcaaagctagtttgggtttggcaaaagggaagcggaatcgaaaagtagggacagagaattggaatgtgcacaccttcgaaagtttcctaaagaaggcgaaaaatgttgcagagggtgagttggtgatcattgatgagatccagttgtacccgcctggctacctggatcttctactttacctcatacctgagttcactagcgtcttcgcggtcggtgatccatgccaaagtgattatgacaacgagaaggataggcatgtcttcttaggggttgagacagatgtctgtaggcttctgagcggccgtgagtacgaatttaatgtactttcccgcagattccacaacttaggctttgaaagcagattgccctgcagattcaaattcccggctggagcagtcaaggaagagtatttgttcgttaattcaatgactgaggctaatgagttggacagcgcctacaaaagtgtgtaccttgtgtcatcccacttggagaagaaaatagtggagtaccagagtgacgttaaaacgccgaatgtgctgacgtttggtgagtcgactggttgcaccttcaagtatggttgcattctcatcacgcaagtgagtagcgcatgtagtgagcgcaggtggatcactgctctatcgagattttctcacaatctctgtttcatcaatgcaactggtgtgcccatagaaaatgtggcgaagagttacaaagacagaagtttgggaaaattcctgtgtggaactgctgttgagggtgatataaaatcaatggcttatgggaccccaatcttcaaagagcagttcatcgccggcgttgggcgcgatgaaggtgtcaaggaggataaagtcaccggtgatccttggttgaaaaccatgttggatttgatgcagctcccagatgttgaggaagcagagatgatgcaggaagagatgcaagaagagtggttcaaaacccatttgccacaagaggaaatagaaggggtcagatgccgctggattcacaaaatgctagctaaagaagcgagggaatgtagaatgggatcgatcgtttcagaccaattcccagatgatcatagcaagcaagaggggaagcaaatcactaatgcagctgagcgttttgaagctatatacccaagacatcgggcaaacgacacagtcacattcattatggctgtgaagaaaaggctgagattttccaggccttctgttgagaaagcgaagctcacgcaggctgaatgttatggaacttacctgctcaaaaacttcttggatgtgatcaagctcaagcccgcacatgatgaggcaatgatgatcagagcgaaggaagattttgagcagaagaaggtgagtaagagtgctgcaaccatagagaatcacagtgggaggtcatgcagagattggtgcatagatatagggcagatcttttcgaaaagtcagatatgcaccaaatgggacaacagaatgcgggtagctaaagcagcacaaacgattgtttgctttcaacatgccgtcttgtgccgctttgctccctacatgaggtacattgaaatgaagctgaaagaagtgctgccggctcggttttacattcatagtggcaaaggtttagatgagctcaactcttgggttaaagaaggtaggtttgagggagtgtgcactgagtccgattatgaggcttttgacgcttcgcaggaccagtacatcgtcgcttttgagttggcactgatgaggtaccttaggcttccaaatgacctgattgaggattacaagtacataaagactcacttgggttccaagctggggaattttgcaatcatgcgcttctctggtgaggccagcacttttctattcaacacaatggcaaacatgctcttcaccttcatgcggtatgagcttcatggcgatgagtacatttgctttgctggtgatgacatgtgttcatcaaagagattgcgaatcaagaaaacacatgaaagctttcttggaaagctgaagttgaaggctaaggtgcaacacactgagaagcccacattttgtggctggaatttatgtgctgatggaatatacaagaagccacagctggtctttgagagaatgtgcattgccaaagagctcaacaacctgcacaactgcatcgataattacgcaatcgaagtggctttcgcttacaaacttggggagctggctgttaacaggatggatgaagaggaattgggggccttttacaattgcgttaggctcataacaaaattcaggcatctgctcaaatccaatgtagtggaggtctttaagcgtaaatagttgttactttagcttaggttagctactatagatttgatatatggatgtgcttgtgaataaagctttagagtttggtttcaaaagattgagttccgtgctgaagagtccgattgtgtttcatagtgtgccgggtgccgggaaaacgaccttgataagagcgctgcttaactcagacagcagattcgagggttggacgctggccgagggagacaagcctaaccttgaaggagtggtaatcaggaaatacgttggtggagaagttggtccctttgctctattggacgaatattgcgtggaaccggaaattgccggtaaactttacgctgtattcggagatccgctgcaggtgaacaacattggtttcctaagagcaagctggattaaagtggaaactcaccgcttcgggaaagccaccgcgcaattgctaaatcaattcggttttgaagtcagttcaagcaaggcggacattttggtcattgctgatatttttgtgggtgaacctgagggaacagtggtgtattttgaagaagaggttgggtgcttactaaagcgacatagcttggaggccgtgcacattgatcttgtgaggggcgatagttttcctgtagttacatttgtcacatcggaaaattgcatgatattggataaggtgcgcagtttcaattgcttaacgagacattctgagaagttgatcatcttgtgcccaaatgccacttactcccccacctgattacaccaaagcaattttggccgcttgtatcggtttgtcattggctttgctcgtcggagtttactctcgtagcaccatacctgccgtgggagacaatttgcattcattgccgcacggcggaacatacctggacggcacaaagcgaatagtttacggcgctccaaataagctgaattctctggagggccaacgaactttatcaggtcaaccttgggccattgttatcgtgctgatagcggtaatcatattgttgagtcgattcaactccacttgcgcacactgcggtagatgtcattgaccgcaatttatttagccattggtctgctagtcttcagcgtgtctgtgtatttaattcagccaaatctgcaggattcgtgctcgatcgtgattactggggaaagtgtgcgaattctcaattgcagggtgactgaggccctacttcgatttgcactggaggcagagcccaagagcgtgaagatcccttaggtttactgggtttgatttgaatatggatcagaaaggaaaacaaagtgagagttcaagtcaagctgtggcccctgttccaaaaccaccgctgccccctccgatcaggggcgaagaggcggttaatgaaggcaatgaggaggcgaagatggagcgacgcctagctctcttgcatcagcgcttgaagggtgagcggaatggcacacgcattaccaatccgagctttgaaataggaaggcccagtctgacgaggcctgatgatatgaggagggatcccgccaacatattcagtaggttgtccatcgatgatctggcgcagatcaagccaacacctgtgtccaacaacatggctaactcggaggaaatggtcaagatcgctgtcgctgtggaagggctgggtgtacccactgaacaagttgcaaatgttgtactgcaggcggtgatttactgtgctagtgcaagtagctccgtgtatctggatccacatggtacaattgagtacacagggggagcagttgttcgtgattctgttgtagccatcatcaaaagggatgccgggttgaggagggtgtgtcggctttttgcgccgttggtctggaatcacatgttggtgcacaactcacctccctctgattgggctgctatgggcttccaatggaatgacagatttgcagccttcgactttttcgactatgttgaaaatgaagctgcgatacagccgttggatgggttgattcggaggcccacaaggtctgaaaagattgcgcacaacacacacaagcgacttgcactagacaaatcgaatagggatgaagtgttcgcaagtttggaaaccgaaatcacaggtgggaaaagaggaccagaaatcagcaggaatttccgaaatgcagccaattagccactatgaagccaagctcctagccgtgtctttagctatgtataagtttacgggacgttgtgagcccgctgttgctttaaatattgttaataaagcttgtaatgttggtatgggcaagagcagcttcgcgcgcaggcgtagggcggctctcctggggcgttgtcatagatgctttagaacttccatggccacacgttgcaatggtgtgacttgttatccgggcattggagctaagccaaaaatcgagatgttcatcaaatacggtgtaagtgagctgaaaccgtaattgagttgtgcataaaacctaattaattttaagtgtgcaactataaaataaataaagttttaaatatttttccttt

SEQ ID NO: 487 - DNA, 6495 bp, Apple stem grooving virus
  source 1..6495: mol_type = other DNA
aaatttaacaggcttaatttccgcgctttacgtcaatggctttcacttacagaaaccccctcgaaattgcaatcaacaaacttcctagtaagcagtctgatcaactgctttccttgaccaccgacgagattgaaaagaccttagaagtgaccaaccgcttcttctctttttcaatcacaccagaagatcaagaattgttgactaagcatggtctaacacttgcacctatagggtttaagtcacactcccatccaatatccaaaatgatagaaaatcatctcctgtatatatgtgttccgagtcttttatcctcctttaagtcagttgcctttttttcacttagggaaaataaagtagacagttttcttaagatgcattcagtcttttcccatggaaaaattaaatctttggggatgtacaatgctataattgatgggaaagataaatataggtatggtgatgtagagttttcatcttttagggatagagtgattggtcttagagatcaatgccttacacgtaacaaatttccaaaagttctgtttcttcacgacgagttgcactttctaagtccatttgacatggctttcctatttgagacaatcccagaaattgatagagttgttgcaaccacagtttttccaatagaacttttattcggggacaaggtctctaaggaacccagggtttatacctacaaggtccatggctcttcattttcattttatccggatggtgttgcctctgagtgttacgaacagaatttggcaaattctaaatggcccttcacctgcagcggcatacaatgggctaacaggaaaattagggtaaccaagctacagagtctcttcgcccatcatgttttctcatttgacagggggagggcttgtaatgaatttaatcatttcgacaaacctagctgtctacttgcggaagaaatgcgccttttgaccaaaaggtttgataaagcagttattaacagaagcacagtctcttccctcagtacatacatggcttgtcttaaaactgcaaatgcggcttcagctgttgccaagctgaggcagttggagaagagggatctttacccagatgagttgaacttcgtctattcctttggagagcatttcaaaaattttgggatgagagatgactttgatgtgtcagttctacaatgggtcaaagacaaattttgccaggtcatgcctcacttcatcgccgccagtttctttgaaccaacagaatttcatttaaacatgcgcaaattgttgaatgatctggctactaaaggaatagaggttcccctttctgtgatcatcctggacaaagtcaacttcatagagaccagatttcatgccaggatgttcgacatagcacaggcaatcggggtgaacctagatttactggggaaaagatttgattatgaggctgagagtgaagagtacttttcagagaacggttacatctttatgccctctaaatcaaatccagagagaaattggattctaaattccggttcgctgaaaattgactattcaagattggtaagagccaggagatttagattgagaagagatttcctagatcccatatctaaaggaaaatcccctagaaaacaactcttcttggagtcaacgggaaacattaaatcaaatcccaatgctgaaaaaaatagcgagagcggcgaaataaagattgaaggcagtgccgaaaatgatcagccacatgaggtatcacatacttcaatggaaaccgaggatggacagggttttgaaggttcaataccagttgatttaatcaattgctttgaaccagaagaaatcaagcttccaaagagaagaaggaaaaatgattgcgtcttcaaggccatctctgcacacttggggattgactctcaagatttgttgaattttttggtaaatgaagacatatcagatgaattacttgattgcattgaagaggacaaaggactgtcacatgaaatgattgaagaagttttgatcacaaagggtctttcaatggtttatacttctgacttcaaagaaatggcagttcttaatagaaagtatggagtgaatggcaagatgtactgcacaattaaaggcaatcactgcgagctgagttccaaagagtgcttcatcagattattgaaagaaggtggtgaagcgcagatgtcaaatgaaaatctaaatgctgattccttgttcgaccttggaagatttgtgcataatagagacagggctgtcaagctagcaaaatcaatggcaagaggcacaacaggcctcctgaatgaattcgacctagaattctgcaagaacatggtgaccctttcggagttgtttcctgaaaacttttcttctgttgtcgggctaaggcttgggtttgcgggttctggtaaaacgcataaggtgcttcaatggattaattacactccaagtgtcaaaagaatgtttataagtccaaggagaatgctggcggatgaagttgaacctcaactcaagggaacggcctgtcaggtgcatacatgggagactgcacttaaaaaaatcgacggaacttttatggaagtttttgttgatgaaataggtttgtacccacctggataccttacactgctacagatgtgtgctttcagaaagattgttaagggacaaagtgaaaatttcttgaaaggcaaactgttggaattgtcaaagacttgcttaaacataagatgttttggtgatccattgcaattaaggtattactcagctgaagacaccaatctattggacaaaacacatgatattgacctcatgatcaagacgatcaagcacaaatatcttttccaagggtacaggttcggtcagtggtttcaagaactggtgaacatgcccactagagtggatgagtcgaaattctcaaggaagttctttgcagacatttcaagtgtaaaaactgaagattacggactcatcctagttgccaagagagaagataaaggtgtcttcgctggaagagttcctgtagcaacagtgagtgaatctcagggaatgaccattagcaaaagggtgttgatatgtttggaccaaaatctttttgccgggggagccaatgcagccattgttgcaataacaagatcaaaggtcggctttgactttatccttaaagggaattcattgaaagaggtacagaggatggcacaaaagacaatttggcagttcatcattgaagggaagtctattccgatggagaggatagtgaacatgaatcctggagccagcttttatgagagtcctttggatgttggaaattcatcaattcaagacaaagcttctaatgacctgttcataatgccttttataaatttggctgaggaagaagttgacccagaggaagttgttggggacgtaattcaacctgttgagtggttcaaatgtcatgtgcctgtcttcgacacagatccgacgcttgcggagatttttgataaggttgcagcaaaagaaaaaagggaattccagtctgtgctgggtctttcaaatcaatttcttgacatggaaaagaatggatgcaaaatagacatcttgccctttgcgcgacaaaatgtttttccacatcatcaagcgtctgatgatgttactttctgggcaggtgttcaaaaaagaattagaaagtcgaactggagaagggagaaatcgaagtttgaggaatttgaaagccaagggaaagaacttcttcaagaattcatctcaatgctaccgtttgaattcaaagtgaatatcaaggagattgaagatggagagaagagctttttagaaaaaagaaagctaaaatctgagaaaatgtgggcaaatcattcggagagatcagacattgactggaaacttgaccacgcctttctcttcatgaaatcacaatattgcacgaaggaagggaagatgttcaccgaagctaaagctggccaaactttggcctgtttccaacatatagtcctatttagatttggacccatgttgagagcaattgaaagtgcctttttgagaagctgtggagactcatactacatacactccgggaaaaacttcttctgcctggatagctttgtgacaaagaatgcaagtgtctttgatggattttcaattgagtcagactacacggcctttgactcatctcaggaccacgtcatattggcctttgaaatggcactgttacaatacctgggcgtgtcaaaggagtttcagctagattaccttagactgaaattaactctcggatgccgtctcggatcactagcaataatgaggttcacaggagaattttgcactttcttattcaacacatttgccaatatgctgtttactcaattgaagtacaagatagacccaaggaggcataggattttatttgctggggacgatatgtgttccttgagctctctcaaaagaaggagaggggagagagcgacaagattgatgaagagcttttccctaactgcagtagaagaggtgagaaaattcccaatgttttgtggatggtacttaagtccatatggtatcattaaatctccaaaattgctgtgggccaggatcaagatgatgagtgagagacagcttttgaaggaatgtgttgataattacctatttgaggcgatatttgcctacagattaggtgagaggctttacacaattttgaaagaagaggattttgaataccattatcttgtcataagattttttgttagaaattcaaaattgttaacagggttgagcaaaagcttgatatttgaaattggggagggcatcgggtccaaatggctatcgtcaacgtcaaccgcttcctcaaggaggtcgaatctacagacctcaaaattgatgctatctcgtcctcagagctttacaaggatgcaacctttttcaaaccagacgtgcttaattgcatcaaaaggtttgaatcaaacgtcaaggtttcctctcgatctggtgacggcctcgtcctgtctgatttcaaactgcttgatgacaccgaaattgattcaatcaggaagaaaagcaacaagtacaaatacttacactatggagtcatcctggttgggatcaaagcaatgttgccaaactttagaggcatggaagggagagtcattgtatatgatggagcctgcctggatccgaaaagaggccacatttgctcgtatcttttcaagtttgagtctgactgttgctactttggtctcaggccagagcactgtttgtctaccacagacgcaaatttggccaaaaggtttagatttcgtgtggactttgattgtccacaatatgaacaggacactgagttgtttgctcttgacattggagttgcatacagatgcgtcaactctgcaaggtttttggaaaccaaaactggcgattcaggatgggcttcacaggcaatcagcggctgtgaagcacttaaattcaatgaggaaatcaagatggccatcctggatcgcagatccccgctgtttctggaagaaggtgcaccaaacgtgcacattgaaaagagattgttcagaggtgacaaggttagaaggtcacgctcaatttccgctaaaagggggccaaactcaagggtgcaagaaaagagaggatttaggtccctctcggctagaattgaaagatttggaaaaaatgagtttggaagacgtgcttcagcaagcgaggcgccaccgggtaggagtatatctatggaagactcacatagacccggcaaaggaacttctgacggttcctccccctgaaggatttaaggaaggtgaaagctttgagggcaaagagctttaccttcttctttgcaaccattactgtaaatacttgttcggtaatattgctgtctttgggtcatctgataagacccagtttcccgctgttggatttgatacacctccggttcattataatttgacaacgaccccaaaggaaggggagactgacgaaggaaggaaggccagagcgggttcgtctggcgaaaaaacaaaaatttggaggatcgatttgtcaaatgttgttcctgaattgaaaacctttgctgccacttccaggcagaactctttgaacgaatgtacgttcagaaagctttgcgagccatttgccgatttggctcgagaatttctacatgaaaggtggtctaagggattggccaccaatatttacaagaaatggcccaaagctttcgaaaaaagtccatgggtggcctttgattttgccactggtctgaaaatgaatcgtctaacacctgatgagaaacaggtgattgatagaatgaccaaaagactttttcgtactgaaggacaaaaaggggttttcgaggcaggttcggaaagtaacctggaactggagggttaggagtcgtgtgaaattccgcaaacttggtcgcggtcttgcaggttgacatgcctgcctttatacttaattaaagggttcccccggttttctgagcatttccgggttagtgtggtttttctagagtctagagtttgtccactct

SEQ ID NO: 488 - DNA, 8747 bp, Citrus leaf blotch virus
  source 1..8747: mol_type = other DNA
gaaaagcaacgaaagcaacctacacaacccaaaattaatatattgcaataactgttatcactcaatataagccatggctttgatgagcaacaaaactgcaattgaatctattttgggtaactttgaaaagaaacacgtcgatgcaatctacaatgccgccgcacaaactatcctctctcactctgaatttaggaataagcattttgcttattcactcaattcttatcaaaagaagatagcctcaaaggtgggtattgaattgtatccaaatggttatttaccacattcccatccattgtcaaaaatttttgagaaccatttgctttttgatgtacttcctggcgtagtaaatactagtagattagttatgtgtagcataaaggagtccaaagttctggtttttaaagggattcgcgacaaatccagaagacaggtttcagacctcaatgccctcaattccttaaataatagtcatacatcattcattaataggttagttgcatccaaagatgtgagtagatatacggaagaagctgatgctttttttcaatccaagaaagggagtccggagctattttcaaggaatttcatcaaaagcttggaaaataaagaggctgttttttttcatgatgaagttcatcactggactaaggcccaaatgttctcatttcttaaaagcacgaaggtcaaaaggttcattttcactgtagtctatccaccagaaattctcaaaaaatttgccaattcccagaacccaaaggtttatgatttcaaagttgataagggtcggctttttttttttccggatggggttaagacagaggcctatgagcagaaattgaatatggagtggctcttttcagcatcacatcttcgcagtggagactgtgtatggactgtaacaagacataagagtatttatgctcatcacctgtttgagatatccattggcgaactagtcacggactcaaaactttttttttccgattataactccattgacatgtctaaaatatttcttgatcgttttcggagttatgaggtattccccatttcgattgagcacctttataaggtctactcttatctgctttgcctcaaaaaacctgacttggagagtggtctagctaaattaaggcaaattattggagatgatgtcgaaatcaaagaattcctcttctttgaacaattttgtaagcgcttaattgaacgccaaacctcttgggggctatttgggcactctttctttgaaaaattaaccgatatggcattgtcatccttgcccaactctatagcccgaatttttcctcaatggaaaaaaaaaaacacatttgagttccttttctcacttgggactcttgttgtggatgtggagagaaaggtgtgttttgaacatgtgcttgaggaatggggatttgaagttgttatcactgatgaaaatgcctatcttgatccactatctatctttgctatcaatgaaaattttaatgaggatagagtggacgatggttatttggaaagaatccgtcttcccttctggaatctgaatgactatgacttgaaaagaaagagggtaaatgcgtataacattctctcttatcgatttgaagaggagcgaaaaattgaatcagcgcaaaaaggtccaaataagatgctccagattgagtggtacgggattaaagaatttaaagttgacccttttatcagcaactccataactgaatttactcttttagaagcattgctgggaaagaggatagatccaaaaaaatactcatattcaaagcaagcctgcactctttccaactatctcacatttttgtgtgctgagggtttggatggattcaatttggaagagcaccttgaacgaaggttgaaagcggccggtcatgacgtttcagatgacgaggaggaagaattgacttcagctgaacaagcggggcctatcaagatattggctgatccacttggttttatgaaagagtgtttggaggagatcccaatcgaaactgaaccatcactggaagaaagagggcagttttccactgattatcattctgagaaatttgaaatcaattacaatgacatttttaatcctcacaattgcatgaacactcacggcgatgaaattcccacaccgtcagatggcaattgttttttttcagcatttactgaaacttttgaagttgaaagacctgacaccttgaggtctgatttctcagactggcttatggaatttaatggggggtcctatgcttcacttgcagaaatgatcagaccgaatggagtttttatggaggcagaactcatatacttgttttgtgtatttagaggagtcacgttgattattcatgatagaactcatgaaaaagagaatgtttatgctgtacaccgcgggtttgaggagggccatatggtacatagaggcaatcattttgtcgggattgaaacttacaatattagtactttaacctcagaccccttacttggtgacatcccatgcggtttttcagaggaaattacaaaattccattttcggcctgatcatttcaactgtgcccagttcagaggaaggaaggcggcttttatcaccaaagttgatgcagattacgggcacaacggtatggtttacccccacaattcatgggtaccttctttagaagagatcattcagatctgtggtcagggagatgatttcaattgtgcattaataaatttctatgaggcaaactcatctcttgggttccatagggataatgaacgggtgtacaatgatgatcctattttgaccgtctgcacattcggtgaaggtagattcaccattgaatttaaggatcaggtaacttcttttctaatgactgctggctctttctttttaatgcctaaagggttccagaagaaggcaagacactctgtctcaaatgaaatgtcgagagtctcgattactttcaggaagcatgttagaaggttgaatgggtcaccgattgccatcagggaagaaaattacaaaaatacatgcctcattaatgccttttcaaaagcaatgaaaaggagcaaacaggcaatcattgcaaaactgaagactgttaatagccctttctggagtagatacctatctgagggtaacggtggctccattgaagattgtcaatcggcctgtgaggcactggatgttactgtcgaccttaatgtaaatggaaaatgtgtggttcttggaaaaggggctttaagaatctcaatggctttaagaaacaaccatttttcagttatcaatgctgcacaactgatggagaggacttttgttagccacttgcttgaaaaaggaaatgtcaatgtgttagaaggatttgacgcaatgctaagtggtgatgtgggcgcagcaggtgttaacaaaattcaatttgcagccaattttgaatttgctagaattttggcaaattcatttctaaatatgacaactggcatctgcctgggcaaggcattggataatggggaaaagtattttctccacattttgaaagatagagtgaaacagattggtatagacgtcacaatggtgtgcggatttgctggatcggggaaaagtcgcaaactgcagtcctggctgcattcaaggaaaaaagggaacttctgtgtggtttccccaagaacaaacttagccgctgactgggcattcaagttagaattagagcccaatgaacagagaaaggtttcaacatttgaaaaattcatcaaaactgataaaagcaaattagatctcatagttattgatgaattgacattgtttccaaatggttacctggatctcctcgtgtatgaattggctgatgtcaataggcattgtcaaatcatccttctgtttgatccattgcaagcaagataccacaacaaaatggatgaatcaatcctgacatttgaacatgacgtggacaggcttattggtggacagaacattgagtacatttacagcacgcatcggatgtccagatacttcaatagattttttgatgtaccttgcttcaatcaggctgatagaacagaggaacaaaggttgtggatatttgatgacgtttactccataccatccatttgctccgaccgtcaggaaccatgtgatgttcttttggttgaatctgaccttgaaaagaaggcattttcacccatcataaatgttatgacatttggtgaatcccagggactcacatttaatcatgtttgtattttgctgtcagagtccagtgcagcttcaaacgaatttagatggatggtggcgctgacgagagcaaggaccaggttttcactctgttcaaccttcttaggtggaattgaagaatttaaagtcaaaaggaaggaaagtctcatcacatccatactccaaggcgagaagatcacattcaacagattaaatctgatgctgaaatgcaatttaattaggagagaaaaagaaaatgggtgcagagatgaggtcgatagggaggaaaggttggagggtgaccctttcctcaaaccatttatcttcttgggacaaagagttgagaaggatgaagatgaggtagaagaagtgaagatcagggaaccaacctgtcaaactcatctgtatataacagagcctaattttggtttgtgctacaatttcgacttcattagggaaaaagaacagcgggaatacagagaggatatgcttgtaactaaccaattctgtgacagttatgataaggttcatataaacggcaaaagagaaacccctggtcccctgcgattcaaagcgatttatccaaagcactcagccgatgatgacatgacgttctggatggccgtcagaaaaaggcttgtatttagagaagaggaggagaattatcaaaggttgtcaagggcgcatttagttgggggtttgctatacaccaacttcaaaaaaaaaatgggcctggaatttacgtttgaccaaggtctactggaggaaagcataaatgcatttgaaaagaaaaagctggaaaaatcatgtggcacaattaaatctcatagcataaggtcggacattgattgggcgctgaatgatgtatttcttttcatgaaaagccagttatgcaccaagtacgaaaaacaatttgttgatgctaaagcgggtcaaactcttgcctgttttcagcacctgattttggtacagttcgctccatggtgtagatacctagaaacccagatcagaaatcagttgcctgaagaaatttacattcactcaaataaaaattttgatgatttgaatgcatgggtcaaaaaatttttccagagggatatctgtgttgagtctgattatgaagcatttgatgcaagccaggatgaatacatattatccttcgagattcatctgatgaaagatgcgcattttccgcagaaaatcattgatgcatacatagaccttaaatgcaaattgggatgcaaattgggccatttttcaataatgagatttacaggggaattttgcaccttcctattcaacacactggccaatatggcattcactatgtgtagatacgaatggaggagaggacaaccaattgcattcgcaggagatgatatgtgtgcattaaacaatttggctgtttgtcatgatttcgatgacctttttgaactcatcagcctaaaagctaaggtggaaaggacagaaaccccaatgttttgtggatggagactaactccatatgggattgtgaaggagcctgaattagtctataatcgctttcaagtggccattgaagagggaaaggtcttggagtgtctggaaaattatgcaatcgaggtttcttatgcctacagtttaagtgagaggctgtatgaagttttgaaaagtgaaaggcaagttcagtatcatcaagctgtggttagatttatagtcacgcacattgacaaactcaaaacaaaagtgagggaccttttcttagaacaatcttccgacgaagatatctgatggcatccctgatcaatgtaagttcacttgtaaatagggtgaagttggatcaaagtataataggtagtgatgaaataaacaaactgtatggttccgatgcaccattggtgttcaaagatgaagttaaaatggttattcctgggaatgctgagggtgaggcaatcaaattgcaagcaaatattctgaccgctgacagattgcagtcaataagaaatgcaaaagtcaatggcaaagaagcggcttatctgcatttgggatttgttccaattgcaattagatctctattaccttctggaaatgaacagatctggggtagatgcgcactggtagatactagcagaactcgagccgaaacagctgttattgatgaatttgaattcaagttcacaaagaaacagccatttgctgcaaaactactaaccatcaacgctgcagtggatattaattgcaaagtgagtgtcggtagcattcaggtgctgctggagctccatggtgttgatctgagggaagaacgttctgtagcagcaatcatcactggcttaacatgcactcccaccaacaaaatggtgttgctgcataagatagagtgcgacacgcccaaatggtctttgtgcaatataatagagcaggttgaggatgaggaagaatccaagaaggcatttgaaaacatgtttaatgcatcttcttccaacttgatcgacttgggtcaagaacagtggctcgacgaaggtaagcgaacacctttgattggcagcttggcaattaaagggtttggacgcaaagtgatgcctgttcgcagacgaaacctcaccacgagaaatctcatgaaggattatgtgtctcatgttaagtcagagacggcttcactgaaaagaagtcaaagtggaagagattggggtaatgatagattgagaaaatatctagaagagcaggctctggagcaggccagatcatcgactgatcatcagttggttaaagcaccaaaatttaaaaccatcgaagtgactggtttggaaactgtgcatgatctaaaagataaaattgacaaggcagagtcttcaactgccagtgacactggaaccaagtgagtataacgtgtgactagtgtaaatagttagtacttatttgaattaatatagatagtgtacatccatgaaaatcaccaatgataatgccgcaactatcaactattggttagccatagttgaaccattcctcacatctgatgaggacagaaattctgatgacatcattcgaaaattcagagctgtagtggccgagcatggagacacagaggaggtggaccctgaggtcttcttcgccattttttccatcttggccacaaagtacggcagagtttattcaaaaaaagttgaagaattgaatgagtcactcaaagctgcaattttggctggggcagaagcagaagatctgagaaacaagttgaaagacatttcccaaagatatgcatcacagcttgagatcacagcagatagagagcagcagcttgaaagtttgaaaaaaaaagggcatgagcaaccactgaccggcagtggatcttctgaaccggtacatgctgaatcagcacacgctccacagttgcatgtggtgaatgatctgcaacaattctacataccattcaatgaatacccaagtctaactcagtcaataggtacttctgacattgcaaatgatgagcacctcaaaagagtgcaacttacgcttaagattacagacacgaaggtcttttcaagaactggatttgaatttgcgataagttgtggatcaagaagtacgtcagacaaggacccatatgatggtataatcaagatcagcggaaaaagtcatatgaggaaagatatagcatatgcaataagaacttcgggaatcactgtgaggcaattctgtgcagcctttgcgaatctatattggaatttcaatttggccagaaatactcctcctgaaaactggaggaagaaggggttcacagagggaacaaagtttgcagcttttgactttttctatgcagtaggtagcaatgcagcaattccaactgaagctgatgggagcgttagactgataaggcctccaacaaatgaagaaaatgaggctaactctgctatgaggtatgctgacatatacgagcaaaattcaaaaacagctggacatgtaacttcaagtccactgtacaatcgtgggagcagttatgagagcaaaaacaaagcaaaactcttagaaatgtagtcccgaattctggcatgggcggatgggtgggccaggactttacactcttaaagtataagtaaggggtaactcagccgcacgggtgaagattgtgcggagcctcatgaatctgaatccaagatgctaaaggggataccgcgatctgaggggtcatgggggttagcctgaagaacagaacactcattaagtatgtggtgacgcaggtcccgacaacccaaaaaggtgagctgaacctgatccaattggagcagtacaggtaaagttatatcctttctataaattgaaaggtagtttggacagatacatgtcattcaattggtgtggaacgttagtccaaatgaaacatttatgcttggatggaaagtcaagcaaacgttgtcaatgtgtacgtgaaattgtcaaataaacctcagcaatttctatgccctctttgtgctgagtattgtagagggtgaaggtgtgttttccattttatacgtcaataaaataaaatatgtattacttaaatacacatagggatgtcttttaagaacttttagac

SEQ ID NO: 489 - DNA, 6812 bp, Apple latent spherical virus
  source 1..6812: mol_type = other DNA
tccgttttagagcttgtgagttgttattacgttttgttgtttgaatctctgttttgttactctgatttccttcacgtttgcaccttacactctctaccgataaacattatcatcttttattttgaattttatttgaaaaatttttatattttcaatgtcaatcactactcctgtagtgattcgctttgggagttttgactcccctgctgcggcacagattgccgatactaaggaggaggaaactcctctctctcgccttgcagctttaaatcgcaaggctcaaattgctgctcgttcaagagtagcagctgctgcggcacagtatgccgaagagcaggagacactagttctcactgctcaatccatgagggatgctctccctttatggatgaggggtcttgttgcccccgctcccaaatccaaacgcgctctcaacgcgaggcgcgccgtaaggcgtgggaagcctctgaggaggctgcctgggttcgtgactacggtcgtgaacccacttcccctctctctgtttgggagggcactcctgagctccttgctatggagcatgcttaccttgccaagcaaggtgataagcgcatctgcgctcatttgcgcagacaggctctgcgggctgcctacaaagcccgatgtcaaaagagggcctttaaggtcttccaggaagaatgtgaattcttccgtctccctgtccacattgtggacaaaatccaaatcccagggcaggctagccccgtgccagagagcgtatctctgggtggcggtgttaaaaccgctacttctaagcgccaagtgaaaactcggcgctctttctcttctttcctcccaaaggaggaattttcctttgtgttgggcccttgcccaacatcttcccctgaggttactccaacctcaaccccttcaaccacccccccttcttctccacgggcatcttcgcccagaacccccttgcctcaggttaaagaggtgaccacacagggtattactctgtgttctcatgggcctgcttgtcaggaacatttttgttttggttttctagatctcaaagatgagtttcatgcttccacttatttaaagtggatgcttggaacccaactacctgggtctattttttgttttgacctccaagtttctagttatctagagcactgtacagatacaatggaggctattgatctgtggtggcatgttatggatcgttatgtgcgtaattacagagctaccaaatatgtcactaaagacaattacttaacaaaggctagcattgctattgatactgctcctaaagagtttatcaataagtgtaaattgttgaccaagcgtgcgaagcatcgaaatttgtcaaagaaagaatcttatcttcttaaaagaaatgaaagagattctaaatattgggatgcttttatagccttacgtactaatactaaagaaggtcaaggacctatagattgggtgaaggctggttatcgtaaatgtaaagaatactatgataacaccttctccaaatttgtaaatcaaattatgcaatcccttaatcctctaactatgatcctaggaccgtttaagtctgctttttgggaatgcgtttcaaatctcaaagataaatgtgttggtatgataaacgatcattggcttgcttttgcagcaggttcaacacttgttttgaccctcatatttctttttgcgatgatttgcatttgtaaagtttttgtatatttactatctactctaggtatagttgggtgtacagttacttttcttgtaacttctttaatagttattttctttttatttaatggttttctcgaacaagctgcagatattcaactttgtgagcttgttggagctgattttttaaattttttgaaccaaaatcaaaacatcgctcctattgctgccacaatggctgatattaaagaggaagctctcagagggcaagggttgcaatggtgttttacagctttgtataaattaatttctagattaattcctggtggagctaaggaagctgccatcatgtttaatagcgtaggtaatatcagtcgaagcgcaagtcatgccaaggatttctttgtaaatatgaaggaaatgactacttcttggattgacgccctctctgatgccctggctcttctaggagatgactctgtgactgctatgcacacattaaagcatctctgtgagaatgatttcttggaatgggctaagagagttgagcgctatgcaggtgatacatatgattctatgattttgaatcctgcagatcgacttaggataattagggaattagttgaccaacaagtgggctttcaaaaagccttctttaaccccagaatagcttcaaaggcacctagattgatgctcactgaatttcagcgcttatcaactatgttgagagattgccacagtgcactttctcgagctgccctctttgatatgcaaagagttcctcccttttggatacatttgtattcagagaatggcggcacaggaaagtccatggcaatgatgcctttgggtaattatttgttagattctattgaggaacctaagacccatagattcgttactaggaatgtagcctctcgatttttgaatggctaccttcaccaaccttgtttcctcatggacgagtttggtgcagctcctaagacggactatatggacgaagtcactatgttggatctcgtttctcctaaccctttaacgttgaacatggcagctcttggtgacaagaatatcatgttcacttcaaaattaattatttcaactgctaatcgtaggctagctcaccctgatgtaaaacttggggctaatttagatggctttctcagaagacgccacattttggctgaggtggtgttggctcaagggaagccatattttcatgaatttattcttttgaaagcgcgaactgagcagaaaatttatttggatcaagcattgcgagaagttgcaagccccatccatttaagtcctgctgaattttatgcagtttgcgctgagcaatttgtaaattttttaaatcaacaagggaatgctctcattgaacagcagggagtttcctatgttagatctgacgatttttcttttctcaaggattatttgcagtataagatgggtcttgattttcaacaatgtgaaatagagagaatagttactgattattctctctctattaaaaatcaaactatctttccagctgagcatgaacatattttctccagatggagggctgaattagaagcattatccttgtctgaactaattaccatgctcgataagcatgttaccgaaacttttgtatatactctaattaaagagaatcactcaaatgtggttatgtctaacctaacaccttacgagtgcttaatttattctttttgtaaagataagtataagaaagaaactgatgcaaccttctcttctcttcctgaagaggaagttaagcagccttggcttgcagaatttctttcatttacggcaaggctatgtctcaatgtgcccaaatgggtcacattggtcctagccttgtgtgctttttgccttgtaggttatgtactaattaaatttgctataggtttgtttacaggtgcttgtacaatttttagtgttttagctttttcctctttgtctgctcagggtcctgaggattctcctggattcgaaaacgctaggaaaactgctggggttaaggtgcatttcgttaaaacatccttccaaccttctgactggaaggggattaacgttaagccctctggatttaattggggggacgttgctgatgacgatgatgctatccctttgtggggtcaagggcctgatcagaatcaaaacgttctcaatcttttgaaacaccaagttgttttaatagcagagcattccaaggttgtatataatgctatagcccttggaaatagaaattttttgtttactaaacacgtttgggatctcatgccaacctgtaattatggtttattcgggtatgcgattgctaaaaataaaatatacattaatcctaatgttagaccagccattcaattaaaaaatagagatttggttgttgtacagttgcctgattctgttcctcccttctcagccttacctaaggatatttttctaagtaacttagctgaagcacctaaggttgctaacgctgctcttgttgtatcagagccattgtacgagaaacgttcagtggctcaactacaacaaaagatttacccttttgagaacctaccccaaattcatagtagagacacttactcttgtgggtctttgggctcaaagcctatgcctgcctgttattcttatacttttgatacttttgcgggcttatgcacttcacctcttatttctatggatggcggcaggtgcgttttactaggtttacatgtagctggagataaaagtaagatggggtatgcacagatagttaccctggaagacttctccgatattaacttttctgagaaggttggacaaggacccgagcaaatgtatataccaactgctcgatctgaatcctttggatcagtctgtcttcttgggaaatggactggccctaagccttattttttagagaatagttctttaactccctctctaattcatgactgtatagatatagacatgacaacggagcctgctattctttctaagaaagatcccagacttcaatacactaacaataaagattttgatccttttctctcaggtatgggaaagtatgctgttgaggctcactcctttgatgaagatgaagaattgtttgaggatgctctagatcgagttttctcagagatacctatgtttacctgtgaagatttatctaatgatcaggtatgcaatggtatagaggacgatgattatgctgaaggattggttatgcagactgctgaaggttaccccttctgcactatgcggcccccaggagtcacaggaaagacgtggctttttgcgggatcaccaggtgattggcacatagtccccaattctcttcttgctaacgaacttaatgtcaaagagttgaaccttagcaagaatatttttgaaccagtgataggtatagattttcccaaggatgagaaagttgattcttctaaagtgtacataaaacaaaaaactcgactttttactatcctacctgttgattataatattttagttaggaaatattttctttcttttgtttcacaacttatggccctccataatgaagttcctacaaaggtaggtattgatccaatttctaatgaatggtctattctttgtcattctcttcactcaaaaggaaccaattggttcaacggagattattccagatttgatggaataacacctcgtaatgtgcttcagggcattgtgaagagaatttcgcgtagatatgctaacaagagttcttttgctataacagatcctacactttctatcaatggtgatcttgctagatcccttttgatggatatgtgtagcactcgatatgggctaactaatggggacctttggtatgtcacttctggtataccttcaggatttcccttaaccgttatagttaattctttagttaattctttctttgtgcactttgcttatatgaagcttcattcttctgaagtgcacaaggctttgtatcctctttattcttttagaacccttgtatcatatgctgtttatggggatgataatctaatttctgtacatgacacaattaaagatacttttaatttagttactatatctaacttattgttggagcatggtgtgactcttaagaatggagccgataaaaatgaggaaattttatctccattctatcctatagagaaggtggattttctcaagagacgattcaccactttacaaggacatattgttgctccacttaacactgttaatataactgagcgcttgcactgggttcgtaagggcctaggtgatgctgatgccacacttgagaactgtaaatcagctctctttgaagctttatttcatggagagctgtattacaatgatcttcgaggcaaaattgaaaaagcttgtaaagtgaagggccttcctttgatagtcccagattaccaagacgctctttctttatttttaactggaggctcatatgctaaggctattcaggctatagcgatgaatctccctgatagaatctctctgtacaaatctgaattctatagtgtacaaatatatcctcaaattttttatgtgaccaatgagagaaatgtcacacttcagaaattgctggagaccactactctccgtaacatttgttatgtttctaggaactacgagtctaggagcagttctaggggtcttttcactcttaagggtgaaggttggactccagctgctttgaaagctcgtcttagtgtgtacaaagctatggccaaacctgtttacttcgtagatgaggctaatgatggtttggctatgttttattgcttagattatgcttttcgtgtttgtggtttaacccggagtcaaattgcaaaaattcttaatgcagtttttggtggtaaccccgaagtctgccaaagaattttccaatttttctctcaagtcgagccaaccaataagtacattcctcccaatcaaaggaggtaatttgtttggtctttcttccttcttttctttctttctttcttttgaactagtttgttctcgtgatccttggatccgttaaggtttcttgctggttcttccttaagatgagaacatgaaccagtctagttctttttgtttgctgtttattttatttcagtgtgtttgaaaagagtcggatagtccaatcc

SEQ ID NO: 490 - DNA, 8170 bp, Soybean latent spherical virus
  source 1..8170: mol_type = other DNA
tttaatatttgcaatgtctttccattgtccaagttctacttgccttggttacactcaatctttctctcgccgtgatatgcgagagcaaggggatcgttgtccccatgctatgtgtggtgctcttctagtgaagaaggtgcccactttatccccacagggtgccagacctgtggtatcaaagaccactgttgtggtccctcctcaagccactgaggaggttttgtattatgggtgtgcccccagacccgcttttcttgaagcggttttggcggccccaaaattaaagatggctccaccagtggtggatgcgatggaagtcgcatacctccgtggtgttgcagccatggaagctgaggagaagaaactcctcaggaaagaaaaggctgcagttgtggcccgtgctaaggcacggcgagctgcaaggaaggcagccaagaagcaagttgccgagatgaaggcaactgtggccctgaaattggccacaaggcaaaaaactgcacgtttgagtgcagctaagagggccatgaaggccaaaagaaaggcagccaaggaggctgccaggttggcgcttgaagagcgccgtgctgcgggtttaacccgcaaatcggccttcaggcgtagcctgaaaaagaaagccactaagatggctggtaggaaggtccctaagacctccacttccacctttcccaaggtggaatctttttcttgttttccttcttctcccctccctgcttttattagggaggaacagccctgggtggctgtgaataccccctgccctcatcctgagggcttcgatttggcggttgatcccgcctttgtggctcctattgtggggccaatcgttagtgtgccatttatggcacctgttgtgaaggcttttaatagccttgtagaaattttggcggctatcaattatgaggccgctgtagatttaagagcctacattttagaaatagcttcttacgaaaatttctttgctttacggagaatttttgttggaaaagctttatcttggatggctcttatcctacctctttatccctatgcgggcatctttgatacttatctcccacttgatatggtggaagataagaattgtgatgcttatttagcctcattacagcagactgcagtgatggtgctggaagtgacccagggaccaatggacgcacattctatctttgatatagtgcgttccgttggttctaaggttgctagcataaaggacaaggtagtgggatgtatagttgagaaatctgctgccctgttggacactgttatagacacagcaaagggcatgttttttggagttcttggcccataccttgcccgcgcacagaagatcggagaggaaattaaaaaattctgggataactgtgtcgagtgggcaacaaaattgtggcaaggagctcatatagcattacaagctcttggcatttatgctgtttgggctatagttgctatggtgcttgtaggagtaatgtatatattagaaacaattttgatttgtttaggtgtaatgagtggtcatggtgtccttgttgttgctttgacaggggcagtcatgacttttttaggttttactgtttttcagatggggcgtgagtatatacattttttgaccgccctacgtcaaatcattttcttagcagttattccccaaggaggattgactcaagttaatatcatggattcgtccgttgatgttactgagccacactccttgttagatactgctatggcaccagttcattttttggaaactgttgccagtggtttaacattcttttcttctacctctgttacagtcttaggtaaattaggaaattctctggagggaattcgcaaaggttttaattgcctacgcgattttacttccgttttgttagaacaatttggaaatgcttttgaatacatttccggtaagagaacgtctttcttccgtgatcttgcgtgtgcagttaaagtagatatcgctcgatggacccaggatgcacgggaaaccattgagtattttgaaatttcaggttcccttgataggtatgagtattatcgtgctcgtgagcttatctatcaaggtcaagatttgatcgacaccgccaacaaagctcgtagttcgcacacaagtgtaaaattcttgcgaactattggcaagttggttgaggaactaaaagaaattcgtgctaagtgtgcacgaagtttaaaattcccaggatggcgtcgacagcctttttgggtatattgttttggtgagagtcaatgtggcaaatctactttggcaaattatttgatgccattgttgatgtctcacatgggttgggatcctcaggatgtttacagcaaggatcccgttgatggttactggtccggatattatcagcagaagggtttaaagataaatgatttatctgctgttaattccaaagatgtagcgcccctcgagcagcagttgataccattgatatccactgaggagaaaatggtgtcttcggctgaaattgaaggaaaaggaatgcagtttgcctctgaaattgtagtttcttcatccaattttaatgatgcaccaactggtgctgaaattttggatgcagatgcttacagacagagacgaaaggttttgatgcgctgcagaagggctgctgagtgggttcataatgctgatggtacgcgcacagagaagcttgatgctgagggcaaaattgtatataagccctatgatccatccaatgctttatcttgtaccgaggtgcaatggattcatcctgtttcatttacagctcttcccggaccctgtgggcagtggcacttagccgagttcaccatacctatggtgaaggaggctatggatgcccactttttgcaagaagaaacaaagatggcatcctggaagtcgagccttggcatgaagagtcaaacagcaaggaaaatgggttcatacttgcaggatatgattaagggtattggtaattttgttacccttaaaggagcaaaagattcagatcctcgttatttgctggtagctgttgatggaaaatgctatgcgttagaccagcaagggaaagccactccttatgaggattgtgatgttgttgaagaaattgagcggctaactttgttgcaataccgctcttatttcgcggacttggtaatggaacatgctgacaatacatattatcaagattcattccattcatcaacagtccgagattttttgttggctctaatgaaagatgggtcaactgttttgtctgtggatagtctgggtagtagtactcaggacattcacaaagaattatgggcagaattgggactttcagaaaagatttttctgagggtttcacaaatagctcgtaatcaattgcgcgatgctccacattttaaggaagacgttgcgcacaattttttggaaactatgaggcatcttagggatgctattgtagatagaaaggaacaaattcttttattttttgcagcagtagctttagtgggcttgtttagttggggttttttgagcctaattaaacaatttgcttgtggttctttaggatttggtgctggcatcgcattgcgtgagcaaattgctcatagtagtgttatgtcttcaggtagtgtgactagtgcctttgttgcacgcaacatgccagttgtatggggcaaagctgctaggtatgccactgcacactcaagcaaagaagaagtgggcgccaattttgattattttgaagatgctagtgctcatttgttagctcgtgttgttggctcatctggtcagtctgagacctgccttttatttggtcatcaggctattgcactttgtgcgcaccagttgagattgtttcctgacaatgacagggtgactatccattatttttcaaaggagaggcgccctgtttgtttttcatttacttggcattatattaatgctattgagtggcctgactgtgaagtaattgtatatagagatgcacagctcacgccactccctgtatatagtgatgataattatttgtgtggggagcaaacattgcccacagttttaacgataactgggctctcaattaagaagaagaaattctttgatgattccacgttgtgcccaagcgaaaaaattctggacggtgaaatgcccatcgtccggagctggaaagataccgcttctctgagaacgcaagtccagacaattttgtccgagactcatagaagagatataaataggtattatacttctagttacccatcagggaaacatgatagtggaggtataataactgcagttataaatgggaagcgtaaagtgataggcatgcactgtgcgggggcgcaaaatgggaaaatttatgttagtaccattggtcttttgcccacccgcaacattaatgatgcacactctgctgccgattattttgttccaagtattggcagggaggaaaaaggattttgcaagattggttggattgcagatccttcaaagagaccacatgctgccactaagactgcattggcaccagttcctaaggaattggctttgccattgccagagggagtgtctgtaaagattccttctattttaagtgcagcagatccacgcctgcgtgatgaggtgaatcctgaatttaaggattatgatcctctacgcgtaggtatggataaatttgccaaccccatggatccgcttgatgatgaagttttacagcgggtctgtgaagatatttatgaaacctggtatgactgtttaccaatactagatgatgagaaggtcttcttgcaaaagacctccttggaggtggcgttgaacggtataccgggtgaggcttgctatgaagccatgaggttggatacatctgagggttatccttttgttttagaaaggaaaccaggggagagcggcaaactcagttatgtacatattgatgagaatggcgttcgttcccttattcctggtacatcggtttttagagattaccatgaattgtcagcaagtatactgacccaagtgcctgtgttgaattgcattgaatgtcctaaagatgagttgctaaaaccatctaaagttttggagaaaccaggcacacggcttttcgatgtactcccctttacacataatattcttttgagggagtattttttaaatttttgtgtttttctccaacaaaatagggtgcatttgccctgttctgttggtgttaatccatattctcgcgagtggacctggctttttgataggttggctgcgaagagtgataaagctttgaattgtgattatagtaaatttgatgggcttatatcacatcaagtctacatgcacatggttgcaaccattaaccgactctttagagatggtgaggaagcaaattgtgcgcgtaagaacttgtttttaatgtttacatcacgcaggagcatctgctatgatcaggtttatatggtcaaaggtggaatgccttctggatgcgcactcactgtaattattaattcaattttgaatgaaattttagtgcgctatgtctatagaataaccgtcccaatgccagccaaaaactattttaataaatacgttgaattggtggtatatggtgatgataatttaattgccatacatgatgatgtggtctctttttttgatgggcccattattaaggaaaaattggcagaggttggggtgaccattacggatggtactgataaatcatcacccaccttgttacgcaaaccgctggagtctcttgattttttgaagaggggctttaggaaaattgaagggggaatgtattcttgccctctggataaagggtccctttactcccggttatattacagtgctggaggtaaagggggcctttttcaacttgatatcctccacgataatgttaaatctttcttggaggaactgacgcatcatgctgatcattatgaagagtttcaaagagtgcgcagtttttatattaagcgtattccttcatggtcagctacgctgcctacctatgctacatgtctgaatatgatggaggggcagcggaattcagcaacaccctggcaaccacataaatttatagaaacgcggccttcaggttgcgaaactaaaatgatggcgggccaggataatcatgctcagaagatatgtgtaactgagcgtataattatatgtggtgaaaaatatacgccaccaatactggagacctcttttgttgtttcaatagacaaccccctttatattggtgaaaggggggagtatgttaaaacagagtttggttcaggtatggggcgactgcctactgatgcctggatcaaagctttctccagtcccaagaagcacccacagctttttgaagcttataagatgggtgctactatatattttagatcctgcatgccctatttaaatgcatggtgtgcagtgtgtaagtttgcattggctcatggaatcgatcagagttctattattgctatgtatgagtcatgcaaaccaagaggggcgggcgacattgctcctcttgtggccgtaaaggcatacactaaatttgtgaacagaccagtgtttaaatttaaagagactgttcataaggaagtgctcgaagcacacaatagtgtgcgagtcgcctaaaatgagggcgcttcctttctttactagtttctttgtaaaagtaaactagtccttgggggcaggtagctccctccagcagcttggcacttgattagctttaatagtgttagctacccttcagcaaggtaggagctgcggtcgtattcgaaccgttcccgtggaactactcggggttggaagcaatggcgtatagacgctggtgtcatagttcttaaatcttatatgacactagagaggagagccatccctcttgaagcatgcaataaacaaggttgcaccatgaaactagccagcacattgaaaaatgtggcttaagggcttaataccttcgggcgttttggtggacctaacgttatgcgtgattgctgatggtactaatgtactcatgttttccattacatgataaaaggtggattcccttttcagctatgggttatggaatgatcaactcatgcaccagagtgtactaggttagtgtacaaccctctttttgctacctttttctttgcatgaataaaggagatagttcctgtgaaattcaggttcattatcatttactgctttaatttacttttatccctcatctgagtgagacagatggtacgggttgttaataaaagtgtttgggatgcactgtctgatccctcgctgctggagcgatctgagtccagccgcatttgctgcttttagatataagcagatggaggactagcactccccttgagaacaaaatcgagtgcggcctagtcgtctaggatttccttagctataggtgatcgtgggctaatgcataccacagaaacatgcttcgtctttgagctaagtgtgaccgtgatggacacttgcctgtgttctttagcacagtgtgatttccttttagtaggtgatgatgaatgtagttttgaaactatcaccgaggtctgggaatataagcgttttggcaaacgatattgccttaatctgtgtacgacacaattgatagtgtactcaagagagtagggtctggcagcctgaatcttggatgaggtcccgagatgaaaacgggggggtaattaaccccagctatcggtacacggagatttccacgtttatgtaaatgtggcgcatttgctgtttttagatataaacagatattgcaggtagaaaacctgtgtggatacctattcttggagaaggagttcgctcggaagagtactatcttgaaacatttcaaaaggaaatttcattttaaggagagtaggtaagccattatacacctgtgaggagggtacaagataaagctactgctaaatttaatgctactggaagtgattcccagggctacatgcggtgccattgtacttatacctgaagggtgagtttggaaactcctacctattgaaatggtgagaagtgtttatttagtaagctcctaatcattatagggtgacgttgttttcgcaattttgttggtctttaatccttttcaaaattgcttttgcattttaatttatgtacgactcggggaaaagaaccactgtgtgtgtgtttggattcccaatgggtagactataccaatgttagtccccc

SEQ ID NO: 491 - DNA, 76 bp, Spinach latent virus
  source 1..76: mol_type = other DNA
gtggtattgtgcattattattttaacgcacaacccggattaatcaggttttctgagtatatacccgttagtactca

SEQ ID NO: 492 - DNA, 71 bp, Spinach latent virus
  source 1..71: mol_type = other DNA
gtattgtgcagtattattttacgcacgacccggattaatcatttttgtgagaatatacccgatagctctca

SEQ ID NO: 493 - DNA, 113 bp, Olive latent virus 2
  source 1..113: mol_type = other DNA
gatatttcgcactcctagtgaatcttcctagtatatccgttgaaaaaacgagagtgcaacaacaaaaactacagagttctttttttttaaaaaaaaaaaaaaatcaaagagac

SEQ ID NO: 494 - DNA, 80 bp, Citrus yellow vein clearing virus
  source 1..80: mol_type = other DNA
gaaaagcaaacattatcatacacaccccaaaaattgtgatcatcgtctctgcatcaacagctcagctaagaaccagagaa

SEQ ID NO: 495 - DNA, 74 bp, Potato latent virus
  source 1..74: mol_type = other DNA
tcggataaaccaaaccaacaatatttacacatactcaagttaaacatacactgttcaatcttgcgtacgttatt

SEQ ID NO: 496 - DNA, 35 bp, Apple stem grooving virus
  source 1..35: mol_type = other DNA
aaatttaacaggcttaatttccgcgctttacgtca

SEQ ID NO: 497 - DNA, 73 bp, Citrus leaf blotch virus
  source 1..73: mol_type = other DNA
gaaaagcaacgaaagcaacctacacaacccaaaattaatatattgcaataactgttatcactcaatataagcc

SEQ ID NO: 498 - DNA, 384 bp, Apple latent spherical virus
  source 1..384: mol_type = other DNA
tccgttttagagcttgtgagttgttattacgttttgttgtttgaatctctgttttgttactctgatttccttcacgtttgcaccttacactctctaccgataaacattatcatcttttattttgaattttatttgaaaaatttttatattttcaatgtcaatcactactcctgtagtgattcgctttgggagttttgactcccctgctgcggcacagattgccgatactaaggaggaggaaactcctctctctcgccttgcagctttaaatcgcaaggctcaaattgctgctcgttcaagagtagcagctgctgcggcacagtatgccgaagagcaggagacactagttctcactgctcaatccatgagggatgctctcccttt

SEQ ID NO: 499 - DNA, 13 bp, Soybean latent spherical virus
  source 1..13: mol_type = other DNA
tttaatatttgca

SEQ ID NO: 500 - DNA, 192 bp, Spinach latent virus
  source 1..192: mol_type = other DNA
tgttttatttataaaacctggttaagggtcctccgggatgtgctcagcacctagcctaagccaagtccatatgcccacctatgctgctccgggtggatgcttatacatgctatggatgcctacatttgaaataatgtagatgcctaatactctctctcagggagagagtttagatgcctccaaaggagatgc

SEQ ID NO: 501 - DNA, 194 bp, Spinach latent virus
  source 1..194: mol_type = other DNA
tgtgttcctttcatggaacctagtgaggggccctccggggtgtgctcagcacctagcctaagctaagtccatatgcccacctacgctgctccgggtggatgcttatacatgctatggatgcctacatttgaaataatgtagatgcctaatactctctctcagggagagagtttagatgcctccaaaggagatgc

SEQ ID NO: 502 - DNA, 258 bp, Olive latent virus 2
  source 1..258: mol_type = other DNA
tggtggctcgcctagagcggtgtgctggtttctacctaaggaaccaggagagtggagtgacttggtcatgacaagtcgagtagtactttaactacgagtcgtcgttgagacgccggtccccttccaaggggatcgagagggttttcccggtactttacccgggattcgaattgagctgtctttgacagagctcaaactcctcgctagatactctaacgagtgtcttgaggactctcctatggagagtcagtaaagacc

SEQ ID NO: 503 - DNA, 36 bp, Citrus yellow vein clearing virus
  source 1..36: mol_type = other DNA
aacataaatattcaggctttcagtttccattttctg

SEQ ID NO: 504 - DNA, 76 bp, Potato latent virus
  source 1..76: mol_type = other DNA
ttgagttgtgcataaaacctaattaattttaagtgtgcaactataaaataaataaagttttaaatatttttccttt

SEQ ID NO: 505 - DNA, 142 bp, Apple stem grooving virus
  source 1..142: mol_type = other DNA
gagtcgtgtgaaattccgcaaacttggtcgcggtcttgcaggttgacatgcctgcctttatacttaattaaagggttcccccggttttctgagcatttccgggttagtgtggtttttctagagtctagagtttgtccactct

SEQ ID NO: 506 - DNA, 541 bp, Citrus leaf blotch virus
  source 1..541: mol_type = other DNA
tcccgaattctggcatgggcggatgggtgggccaggactttacactcttaaagtataagtaaggggtaactcagccgcacgggtgaagattgtgcggagcctcatgaatctgaatccaagatgctaaaggggataccgcgatctgaggggtcatgggggttagcctgaagaacagaacactcattaagtatgtggtgacgcaggtcccgacaacccaaaaaggtgagctgaacctgatccaattggagcagtacaggtaaagttatatcctttctataaattgaaaggtagtttggacagatacatgtcattcaattggtgtggaacgttagtccaaatgaaacatttatgcttggatggaaagtcaagcaaacgttgtcaatgtgtacgtgaaattgtcaaataaacctcagcaatttctatgccctctttgtgctgagtattgtagagggtgaaggtgtgttttccattttatacgtcaataaaataaaatatgtattacttaaatacacatagggatgtcttttaagaacttttagac

SEQ ID NO: 507 - DNA, 191 bp, Apple latent spherical virus
  source 1..191: mol_type = other DNA
taatttgtttggtctttcttccttcttttctttctttctttcttttgaactagtttgttctcgtgatccttggatccgttaaggtttcttgctggttcttccttaagatgagaacatgaaccagtctagttctttttgtttgctgtttattttatttcagtgtgtttgaaaagagtcggatagtccaatcc

SEQ ID NO: 508 - DNA, 1569 bp, Soybean latent spherical virus
  source 1..1569: mol_type = other DNA
aatgagggcgcttcctttctttactagtttctttgtaaaagtaaactagtccttgggggcaggtagctccctccagcagcttggcacttgattagctttaatagtgttagctacccttcagcaaggtaggagctgcggtcgtattcgaaccgttcccgtggaactactcggggttggaagcaatggcgtatagacgctggtgtcatagttcttaaatcttatatgacactagagaggagagccatccctcttgaagcatgcaataaacaaggttgcaccatgaaactagccagcacattgaaaaatgtggcttaagggcttaataccttcgggcgttttggtggacctaacgttatgcgtgattgctgatggtactaatgtactcatgttttccattacatgataaaaggtggattcccttttcagctatgggttatggaatgatcaactcatgcaccagagtgtactaggttagtgtacaaccctctttttgctacctttttctttgcatgaataaaggagatagttcctgtgaaattcaggttcattatcatttactgctttaatttacttttatccctcatctgagtgagacagatggtacgggttgttaataaaagtgtttgggatgcactgtctgatccctcgctgctggagcgatctgagtccagccgcatttgctgcttttagatataagcagatggaggactagcactccccttgagaacaaaatcgagtgcggcctagtcgtctaggatttccttagctataggtgatcgtgggctaatgcataccacagaaacatgcttcgtctttgagctaagtgtgaccgtgatggacacttgcctgtgttctttagcacagtgtgatttccttttagtaggtgatgatgaatgtagttttgaaactatcaccgaggtctgggaatataagcgttttggcaaacgatattgccttaatctgtgtacgacacaattgatagtgtactcaagagagtagggtctggcagcctgaatcttggatgaggtcccgagatgaaaacgggggggtaattaaccccagctatcggtacacggagatttccacgtttatgtaaatgtggcgcatttgctgtttttagatataaacagatattgcaggtagaaaacctgtgtggatacctattcttggagaaggagttcgctcggaagagtactatcttgaaacatttcaaaaggaaatttcattttaaggagagtaggtaagccattatacacctgtgaggagggtacaagataaagctactgctaaatttaatgctactggaagtgattcccagggctacatgcggtgccattgtacttatacctgaagggtgagtttggaaactcctacctattgaaatggtgagaagtgtttatttagtaagctcctaatcattatagggtgacgttgttttcgcaattttgttggtctttaatccttttcaaaattgcttttgcattttaatttatgtacgactcggggaaaagaaccactgtgtgtgtgtttggattcccaatgggtagactataccaatgttagtccccc

SEQ ID NO: 509 - protein, 3582 aa, Citrus tristeza virus
MSKLRGSFWSSAIAVNSDYTISRIWRKLNTIVVLHYFGFVRITKVIRDKSADMPIVPLRKSVFPFSVRAAVTSFVLLGVLLTLRIQGASVAFPLSTHLALFVPALFAGFSRFSLCKPPLTSAAKRSLRQAKRESVSLSSRASSRFSREVPRGTRSRLHRRVVRRADTAPVESPQDKPTRRNSRLGKTSHLPYVGEAALDDILRWIEEVNPHPSMVAIPVPITFGTMPATAWCSHSEAAVLRAALTITRLKLISPLRRNTYGTSIMTYLLPLTVPVRFLPASASIFPSKSKLGVEVPSGRDLHTAFVRSSHASAFFSDAVRASFVPSSAEQFFHFRRQRTHVLAITDPVLCGTVSVLMSDGVNTARLDVVAPAYYAYAESLGARVRFLWESSDVDDAKVRDGQCYVRHVFDVALYFGRRADLSVRRALGMYPTVGALKAYLVREYGRDSLKVPMRGTYTFGSVFHCLSLNLQVDLRSIPNHHLVGGTSAHVLIGQVRVSVPGSIVKPSRSAVRRRNRRMRRDGFLGSSGSSSSAGESTRCSDCSSPRGLPSPSVLKPSLGRIPSIDRRFRFPAGTQLRVSVPRRVDDHVYVSTGSNFDELCHAVLTRMSKGTTLEILLHSIRERKGLLGFAACFRWGSSHVFVKRGNFTARFPISAVRYENQYAAVMMDVGTSWVPKGYVPDVDVVKRRRSRNRRFPLSHRAVDQSVPALQSSPVEVASVSSDKPSSSQKASSPSTSSSSSFNSTRSSDWVNVGFSHRTTNKVREPRYAGHRRIGNFTFPRGTVYNTPVDERAYKRVLRLRDTTACSFLRILLARLSGYRPLSDEFFNKCVTSRFVACIEPVESGLVKVHFRSDVFRASFPFDGQPIHPATALTLEVVVSWDWMVTAFQNPLKDGYCYIRHFAEVSLSMGRIFFRRDVDLGPFPYVFEVQHRLERLYGKAALRYGVRGQYSAPRCFHCCYNDSPRPMASFNGYHKMGGEDNSLIITDTDRLRAVGSAYEKVKRNIPDSLLVRSVEKDLIEFNQTLVDMHRSRPGVVVPFQMSENQQVMLTRAYPEFNINFIHSVHSDHPVAAGSRALENHLVRKHAGTDYSDVGGCPLFHLRAGHSGVHVCRPVYDVKDAHRRVVRHHQLSKVSLDQSDGVKQVGWTVNTNSVCGNILGECYHASEAMVMVQVYDVPLRELCRAMINKKTSVCYMTMVTPGELLDARESFFIKDLDCSVELDPIADRVVYCFNNSAYTHTYSTICECMRTPCLVVDGFLFTIEMVSLRCSVNYYCITKSSVCPRISETKRLRYRRCDSDLIRIKIPRYSSKTRSCLPGCYYLYLDAKFVSRVYEYVVNNCVVVNAKTFEWTWNYIKSCKSRVVISGKIIHRDEPIALEYLDGFSAVMLSAGVKGRQNADVSRRLAAFSGETSIFELVGFAISEKCRDLFLGIQDAVERCVKSYLRNSFNMSFVDLSDPLLTISEYSELDVPIDLPGFGGIVDGNETRLMEDGVKSALLRKAVQAEAQLSLKRGNTSEIVPCDDDDDSNGDDSRVSLDTDWWFVLRGGSSGGLRAGAAPSLFRCLLRKLGGGLCLAKKVLELLVKRVVESFSRLKRKTARLTSFANLLLARLSCGFFDDTVFSAVWEIAINLTRIVDGVVKTKLGCFRNLFRLIPKLYAGCKDVVKDVSNAYRSVVSFSAEVLGKSYSKLCQFCLEIFDIGLIEVSARNLGLETCVSIALAIFDVLITFPLGSVSFPVVCARVFGRLAMEVGSNFLFKKVFGKPETLGEDTFRRTVSMVLRPKAFDKLSVDAKGLVRCSGVIPGVLRIILSSLFSEDDAWVGYSKHEVSSLPIVTFCVKRLSYSLERCKEACVAFIVDSAKKILKSLTSEFNESIQNSDLTSGAKSLYGHVSSILYTSSGVINKAGSAVATVKAVGSDISGRVKRMRPRFSLSRHFDEQTSEYYSASDCSELDESLFSETPGLRGNARCRDLFRIVSRRAVACCEYVTILLKRLASRAGEYSYSYVMDTLVRLYVATDDVVRRCRSFTFDCTDKASNFVTGFLSWRSLRSGAYSATPGLGGGSRGLTSFSHTGGFTRVIGALGNTLSVVFDEEFFRTLLHRLRADVVVLLVEFLKNLPVCLFSIYTFIECRGRIFPLREFLWGFCRFVWDVIEGLSINTYQYLSAVAEKVYRGAFNRRFNEEDERTLRVITEAEGRIEFLRVVLAEMERFRAASNEVSSSRSSDSPSFPPTYGEIEELNDDSSDSALVIGVDNGTGRTIVDGETDSASGSDSDVSIPLDRDFEQIGRLGGNGNVDVVRLGLKFVLKLLRNLFDARSFKVLYGLLLQTLFYGGSVNKFVCRLVFSLGTCLPFELLRFACSARRLLKSLASFVYQTNLFSEVMVEHLFSVSRLLYDSRYFATVFSELERLNFYLDYFLSLPKRYLFPNSRARSCARVPVPVIRTEGVAPVRERSLNDILDSLDSLKVSDLKGKSTFVDDGESDSGSEHSGSSISFGSVNEEVLNAVNGDSVCEKAPLMKHVTALSRLERHPSGRKDIPVSRKTFVRGESSGVKSKVSMCDYLVTLNSSFGTVPDMYPVARDITYKKLTNAMREFYYSQKITLYELHGKLSSYWDELKVAGFDRKLTRMDLDDDVYVVDFNRKLLVGRNGSHPFRNTLKSYCFMFCNDGLVPCPRSQKYDYALISNQTSFVAANSFLRAVDGKDLTFTNEEHSLIVYEAPPGGGKTHSLVNSYADYCVKVSCLVVTANKNSQTEISQRISNELMGRKLAAKYVTDAASRVFTVDSYLMNHLRLTTQLLFIDECFMVHAGAIGAVVEFTSCKAVVFFGDSKQIHYIHRNDLGVSFVADIDAFIQPEHRIYGEVSYRCPWDICEWLSEFYPRHVATANVGSIGKSSVSIEEINGCDDVPYDKAAKYIVYTQAEKNDLQKHLGRLTVGRNKVVPIVNTVHEVQGETYKRVRLVRFKYQEDTPFSSKNHIVVALTRHVDSLVYSVLTSRRYDDTATNIDRAKEIFDKFRSSNHSYGSSSLEWYLEKYPTEYKGSKASSAPISCINEFLNEVVVGSSVVQLGDVSEELSSRPFESGCDNVTVETPPLLTRVTYTNRLAFGVVRSQAIPPRKASLQENLLSYESRNYNFIKTERFVGPSEFGRAMAAAVIERCFKMEEMAKIRCDIISLTEANILKWLDKRTPCQIKAVHGELKLPFSVEEQISNFKLMVKRDAKVKLDDSSLSKHPAAQNIMFHKKFINAIFSPCFDEFKNRVLSSLNDNIVFFTEMTNAGLAEIIRRIIGDDDNLFVGEVDFSKFDKSQDLFIKEYERTLYSEFGFDTELLDVWMEGEYRARATTLDGQLSFSVDGQRRSGGSNTWIGNSLVTLGILSLYYDVSKFDLLLVSGDDSLIYSSEKISNFSSEICLETGFETKFMSPSVPYFCSKFVVQTGNKTCFVPDPYKLLVKLGAPQNKLTDVELFELFTSFKDMTQDFGDQVVLEKLKLLVEAKYGFASGTTMPALCAIHCVRSNFLSFERLFPFIRGWYVVDALKLRQLRKLTNLICERVVYDNRVSYFSYFDNPFTKPDANDDNVDDLGQAGELATG

SEQ ID NO: 510 - protein, 1056 aa, Spinach latent virus
MDTIVQMKVLCYESMILLMIPSDVNAPRPETAIGRLISDAAVSGVLRQCDFTAAEASQCFVPIITGRSECIETRFSGREIQFRNFSYSSQSFAAAHRVCEADYIYSRFQTRNTTIIDIGGNFCTHSKMGRDNVHSCCPILDVRDGARYTDRFMSVAGALETQPDRELRLNYCSNKFEDCDVSAPWAMAIHSISDIPITSVVKHCFRRGVKKLIASVMMDPMMLVASQGFMPRLNVQWEIEPDEENKGSRRISFHFVDAPGLSYTHNYDVLMQYMTCNQVIISGKAAYRVERVADLSGVFIVEINPGGNCWNERLDLVPMRDVSCAWMTSLKRKTLVRVAIPQYIHSWEVKYVIADTDFVRRVAEVSFRQYKPETPLQDLVKSVATMISSASNHCIINGVTMQTGTPLAIEDYVPMAVTFVAFAKSRYDSIKEGMKMVRQRGTNIADPNDHYDYEKDGSDVKSFSNHIIPMKNTIKSLFFPMKVKMNDNSMLIYSQGILSTVVDEIKTLFGWDVWDTDDAVIQSLPSFYKMEDVFQVTSDHYCLSHTLSVDWWLEGLYDSYHDMRVAHKKKLDEEESRKTKVENALLKIAEVLEKPDVSDGLKALSELPIISSLLEKKSEEIVTKPQCRDTEKPHINPYADAIKEAQAYYEELEVVNTRNLRGVGDYLFWRKKSNYASVWGADESRVVLEPMARKFYSRDRNVSIPEYERGMTVDGFVSIKWVDGNITEDTWKCLSKYAVVLLDSSCVFDAGSRIMPGLKKALVMDANFKIVIEDGVAGCGKTTSLLKQAKPDSDLLLAANRETANDAKASGVIPKALEYRVRTVDSYLMLRTWFTAERLLVDECFLVHAGLVYAAATLARVKEVIAFGDTKQIPFVSRIPTVKLRHASVVGTLKPRTITYRCPRDVTAVLSEKFYGTKVKTFNLVKQSLELKNIDSSTEIPVEKDTLYIAHTQADKHALMRLPGMNGIEVLTTHEAQGKTRDHVILVRLSKTTNLLYSGKMPDAGGSHNLVGLSRHKKSLRYFSVFADDPDDQIATGIRWSKTLDEQELAAYRAAG

SEQ ID NO: 511 - protein, 797 aa, Spinach latent virus
MDSYHFLSQLCDLNVLTHALYVNQVFEIVDQSTTSYMQMWLYSRVIVPVLKYHLSGDIILDKLHDVFLGTFRSMMVPMIMLNRLSFVVKMTTMNHHRKAYLPLEEREKIHAATFLGHDHWASVTSGSSFYDDLEILADETVNDDLHFDKESSMPDEYQIMWNDGTIDSVWSSQFECEEPPKPKFIPRPSDKVCDPVVIQDAVNDIFPFHHEMDDRYFQTLVETQDISLEVSKCWIDASNFRDFVKGPNSYVEPVFQTGATSKRVHTQREALLAVKKRNMNIPELQSTFDLDAEVNTCFKRFLTHVVDLPRLKRLQPMTGVEVEYFNQYLLGKNPPVKEYQGPLTLTALDKYMHMVKTIVKPVEDNSLKHERPLCATITYHKKGIVMQASPRFLSAMSRLVYVLKSKIHIPSGKWHQLFTLDAGKSDAVKWFKEVDFSKFDKSQGELHHKVQEKIFNALKLPPGFVEMWFSAHERSHIVDREAGIGFSVDYQRRTGDANTYLGNTLVTLICLARVYDLCNPNITFVIASGDDSLIGSVEELPRGPGEFIYNPVNFEAKFPHNQPFIWLKVLVSVDLEDGGREVIAVPNPAKLLIGMGRRDCQYQALDDLYQSWLDVIYYFRDARVCEKVADLCAYRQTRRSSMYLLSALLSLPSCFANKKKFKWLCYRLREQGCLKKDIYPVAKPISAHNIRKEDSNGCDVNQGTDDSFSRKKNRGCWEYVPKMLQTDVSVPVTDKSFHSNRGSSVSPTDCGDGGCSRSASSIGSKNTKPRHRFRAAGVHQPSGRDPDRIPPNHRRSA

SEQ ID NO: 512 - protein, 787 aa, Olive latent virus 2
MAGVLYDEEYVPQEPDYLYCPYEWEGEDPTQCDANVPSVSYLVEAVKKSFTEGNHDMLISCESYHAECCEGPLMNKGLTLSTYFMSYPGISLPAFGGGVIHVTSARVCMQAFYAVTPGRCSCSCGTQFIYRAKGGTGLTFDATNTISSAFKFEDGKVKWLTEDLGLALLAGCFLKYVPIPHEIEIKIERKVEPVSALDFWEPEGLISDVHFVHPQERALAPEPPMDVEMVRLVRTELFEHFNPTLLLNARSDFSGEKLKEVELPRAQSEPLVPRVCLPRGDDALIDQFFIDKAPEHFNREPATDQWQVESDDFTVDFPTQVRLRERDEDWFRRKPDFAVSSIRTGLEMPRIATKKEMLMAFSKRNVGAPQMVEVPQEIHVKRLADRFFRTFLKEGGWDKGDGHYWDDFFHRKGRKVFSLENCYDDPLSSYLVMLKSAGKFSLDLNFPVRSVPQTITYHEKWVTEVFSPMFLQVMARFFSRLQDWVVVPAGPMADFSRVWPSFEGKCLTEIDLSKFDKSQGKLLHDVQREIFLRLGFPPIWCDWWFKFHESSYLNDKNLGIAFSVDYQRRTGNTATYFGNTLVTMIMMAEVYELDSLPFCGLFSGDDNLIVTDRPLEGRVSLFPNMFNMEAKVMRPGQNYMCSKYLCTVDGRVTPVPDPFKLLKKAGASCPLEHLDDFYESFLDYTKYLVRDEVRTLIPRLMAHRYQVSMDEAGVALDQIMSWRKSKTQFFKHFQYRKPIKDSLEAVKSDFLSAFGKVDDRIRVWRGRRTNHKKEVDALKVPLVSFRE

SEQ ID NO: 513 - protein, 1649 aa, Citrus yellow vein clearing virus
MATIRGAIERITDTTVRTTLQEEACRQIRAELKNVEHINRYAIQPDAADALEHLGIGSNPFSVALHTHGACKAIENQLLYVVGTLLPKERVTMLFLKKSKLNIMKRCPKFQDIFLNQHIEPRDVSRYCDFNVQSTSTSIPTRTAYISDTLHFMDRRDLVRLFLNSPNLETLYATIVLPVEAAYKQPSRYPEIYQINYDFDGFQYIPGGHGGGAYHHEFEQLQWLDTGHIHWRGPDCKEIRMTITAQMLESLGANHLFCFKRGKLLTPRVRTFGRDTQVLLPKIFRPADKNFNRAIPLTLANKLLLYAKSINTVTFRDVVAKTRQLMKDKELETYTGNDLLHMANYFFAVGALSGVNSYDQLLGLSAWEACTVRIKNTITNLWEKIAGKKEFGKLLEALEWETFTYSRQVTEFTVTGLPALLPLPDISDQEEIFAQQDELDKITAGATKIRTIDIMRGQANRANPKTPINSTPAQGPQLPDTPDPIDQAASKDLVTKLQKNKRIYIQDDGPEYLMGHMAEVPAWYLEQDDTTTRLKNRCAWFFGPPTYRYGHNDIEYTTIEYYPWVERIGAIFGKYNTCLAQTYDAGARIGYHADDEDCYDPDVTVVTINLTGNATFLLKTPTGTRTWKLKPGDFIIMKPGAQRCTKHAIRDCTTNRTSLTFRWQARTCPTNLRKITNLPKATNQPQTTEWRPVTKPRPSTTASSDTQTPLVIDQERGYTTTSDVTPTIRLPAENGNNTGAGPSSALTLADLNDNQAPTTNKGKEKLEEMVETGPTIMERFLNTVQEPTQDLWDSASESAASYLAEGLGISAIQALPWAPHLELINALGFQGTERQYGPDNCLIWPITHYRELPRSNNVEAPPEVLELLDCINRYPTDVPMLKTRAAAFGSDVKNLRIGALVKNQDKQWRASLALLCEENEHLLPTTVIHGAGGSGKSHLLQQWVASTERGNVVTILPTIELLRDWQNKCPHAPKETFKTFEKALIQNSAPVVIMDDYSKLPPGYIEAYVSLKGQCKLLILTGDPRQSHYHEENPEALISTLDPATDYFGKFCAYNINATHRNAKTFANALGVYSEKEIPTTITCSSYQKSGWPTLVPSILKRTALNDMGQRSLTYAGCQGLTTPKVQIVLDNATPLCSDKVMYTALSRAVDQIHFFNTGPNHTDYWEKMNATPFLKTFIDHTREETFAEHQPAEPTVREYAPATHFPPANENLALEPWVEPLTDKHSRELFHSALGHSNCVQTENTVVQLFPHQQAKDETLFWKTIDARIKITTPEENIRACSIATDIGDILFLNYKEAMGLPQDPIPFEQALWDSCQAEVQLTYLSKPLAALANAAQRQDPDFDSNKIQLFLKSQWVKKVEKMGCLRIKPGQTIASFMQQTVMLYGTMARYMRRIRTSLCPPEIMINCETNPNQIGTWVREYWNFNTQSHENDFEAFDQSQDANMLQFELIKAKYHSIPEEIIAGYRHLKCNAHIFLGTISIMRLSGEGPTFDANTECSIAYNHTRYFVPKGTAQLYAGDDSACASPLSEKPSFQHISPELSLKSKAKIRTQQKGDFATFCGWLITPKGLIKNPTQLYASWLLAKHNKDLADVARNYALDLRIAYQLKDELYELLSPEELDHHQLLVREMIKHKMGHLLNLPEGFKTN

SEQ ID NO: 514 - protein, 1780 aa, Potato latent virus
MALTYRSPLEDIVGAFEPSVQTAIANTAANHYKQLEEEKGILFNYALPPEAKQRLIGAGIYLSPFSAVPHSHPVCKILENHLLYVELPSRLDNSFMFVGIKNFKLDLLKRRHANLSMIQTINRYVCSLDKIRYGSNFVVRSSASYPELCRRKGELDGAVLRELVPELMIKSAKNLFLHDELHYWTHRDLITFLEVLKPDKLLGTLVYPPELLKGAKKSLNSWCYTYRVDKDKLFFYPDGVHSEGYEQPLSGGYLLETSRITTRDGEVYCVDVVCSKFAHHLIAITRGDLIVPTQRSFAPFEAITSKGLNNLVRGKVECFPVCASVVSKLYRYLRTLKKPDEQSAMAKLSQLQANPTGEEIHFIQGFAKLVINTNKIDSLINCDSIKVFMGKLFGPLPNWLTKRLRSVQEVSLDEFVHYFEPYVVNVPTKHVNYGFEFNYVMEDFRYEQGENDLVDMLDNFDGSTKMSTSLCMMTPYVGLAPLTTRRKFLCHIEENSIFRVVSRNIFCSYTNSYKVAVSTEGVVRILEIYSKVSVDLLGAYLGKLLKKTEFIERVRSRVKAIAIKHLKYTWQQVGLAWFTSGRRGYTKYIDCSPYTMNTFKELKERWGVIVRELSKQQDNAEAAKNIPEQEIQTTSKPSCVEKRNYFSNTLMTSFAASGVKGKEQVSSEIAKGRGERSELRATKLMGSCSTLGKVAHIASRKGSMGVLECVARVIKLDFQTALKFLRVKGVWMQEYESIGELEEEQIQSPAYDFCAAIAMTFNVEIELTFPGSELVYHFAASSTVSCIRLSIWEGVVTLMRAENDCVITACAQALAREPEDVVKVLKDRLEESILEEIWNGEGVPFERMYLFFEALDIQAHCNRDGAQLVLNGGGKLARCFVIKEDHIEFAGEKKVSRVLELQDARTSSKADPELVKEFQKAGTVVEYVAVQSRAQVLAKSLVDATTGVCSSTIFNDCESLERSFRFTESELARNVCCVIGTFGAGKSTLFKDMMRQCLGKGVHYASPRKVLANELKASLGLAKGKRNRKVGTENWNVHTFESFLKKAKNVAEGELVIIDEIQLYPPGYLDLLLYLIPEFTSVFAVGDPCQSDYDNEKDRHVFLGVETDVCRLLSGREYEFNVLSRRFHNLGFESRLPCRFKFPAGAVKEEYLFVNSMTEANELDSAYKSVYLVSSHLEKKIVEYQSDVKTPNVLTFGESTGCTFKYGCILITQVSSACSERRWITALSRFSHNLCFINATGVPIENVAKSYKDRSLGKFLCGTAVEGDIKSMAYGTPIFKEQFIAGVGRDEGVKEDKVTGDPWLKTMLDLMQLPDVEEAEMMQEEMQEEWFKTHLPQEEIEGVRCRWIHKMLAKEARECRMGSIVSDQFPDDHSKQEGKQITNAAERFEAIYPRHRANDTVTFIMAVKKRLRFSRPSVEKAKLTQAECYGTYLLKNFLDVIKLKPAHDEAMMIRAKEDFEQKKVSKSAATIENHSGRSCRDWCIDIGQIFSKSQICTKWDNRMRVAKAAQTIVCFQHAVLCRFAPYMRYIEMKLKEVLPARFYIHSGKGLDELNSWVKEGRFEGVCTESDYEAFDASQDQYIVAFELALMRYLRLPNDLIEDYKYIKTHLGSKLGNFAIMRFSGEASTFLFNTMANMLFTFMRYELHGDEYICFAGDDMCSSKRLRIKKTHESFLGKLKLKAKVQHTEKPTFCGWNLCADGIYKKPQLVFERMCIAKELNNLHNCIDNYAIEVAFAYKLGELAVNRMDEEELGAFYNCVRLITKFRHLLKSNVVEVFKRK

SEQ ID NO: 515 - protein, 2105 aa, Apple stem grooving virus
MAFTYRNPLEIAINKLPSKQSDQLLSLTTDEIEKTLEVTNRFFSFSITPEDQELLTKHGLTLAPIGFKSHSHPISKMIENHLLYICVPSLLSSFKSVAFFSLRENKVDSFLKMHSVFSHGKIKSLGMYNAIIDGKDKYRYGDVEFSSFRDRVIGLRDQCLTRNKFPKVLFLHDELHFLSPFDMAFLFETIPEIDRVVATTVFPIELLFGDKVSKEPRVYTYKVHGSSFSFYPDGVASECYEQNLANSKWPFTCSGIQWANRKIRVTKLQSLFAHHVFSFDRGRACNEFNHFDKPSCLLAEEMRLLTKRFDKAVINRSTVSSLSTYMACLKTANAASAVAKLRQLEKRDLYPDELNFVYSFGEHFKNFGMRDDFDVSVLQWVKDKFCQVMPHFIAASFFEPTEFHLNMRKLLNDLATKGIEVPLSVIILDKVNFIETRFHARMFDIAQAIGVNLDLLGKRFDYEAESEEYFSENGYIFMPSKSNPERNWILNSGSLKIDYSRLVRARRFRLRRDFLDPISKGKSPRKQLFLESTGNIKSNPNAEKNSESGEIKIEGSAENDQPHEVSHTSMETEDGQGFEGSIPVDLINCFEPEEIKLPKRRRKNDCVFKAISAHLGIDSQDLLNFLVNEDISDELLDCIEEDKGLSHEMIEEVLITKGLSMVYTSDFKEMAVLNRKYGVNGKMYCTIKGNHCELSSKECFIRLLKEGGEAQMSNENLNADSLFDLGRFVHNRDRAVKLAKSMARGTTGLLNEFDLEFCKNMVTLSELFPENFSSVVGLRLGFAGSGKTHKVLQWINYTPSVKRMFISPRRMLADEVEPQLKGTACQVHTWETALKKIDGTFMEVFVDEIGLYPPGYLTLLQMCAFRKIVKGQSENFLKGKLLELSKTCLNIRCFGDPLQLRYYSAEDTNLLDKTHDIDLMIKTIKHKYLFQGYRFGQWFQELVNMPTRVDESKFSRKFFADISSVKTEDYGLILVAKREDKGVFAGRVPVATVSESQGMTISKRVLICLDQNLFAGGANAAIVAITRSKVGFDFILKGNSLKEVQRMAQKTIWQFIIEGKSIPMERIVNMNPGASFYESPLDVGNSSIQDKASNDLFIMPFINLAEEEVDPEEVVGDVIQPVEWFKCHVPVFDTDPTLAEIFDKVAAKEKREFQSVLGLSNQFLDMEKNGCKIDILPFARQNVFPHHQASDDVTFWAGVQKRIRKSNWRREKSKFEEFESQGKELLQEFISMLPFEFKVNIKEIEDGEKSFLEKRKLKSEKMWANHSERSDIDWKLDHAFLFMKSQYCTKEGKMFTEAKAGQTLACFQHIVLFRFGPMLRAIESAFLRSCGDSYYIHSGKNFFCLDSFVTKNASVFDGFSIESDYTAFDSSQDHVILAFEMALLQYLGVSKEFQLDYLRLKLTLGCRLGSLAIMRFTGEFCTFLFNTFANMLFTQLKYKIDPRRHRILFAGDDMCSLSSLKRRRGERATRLMKSFSLTAVEEVRKFPMFCGWYLSPYGIIKSPKLLWARIKMMSERQLLKECVDNYLFEAIFAYRLGERLYTILKEEDFEYHYLVIRFFVRNSKLLTGLSKSLIFEIGEGIGSKWLSSTSTASSRRSNLQTSKLMLSRPQSFTRMQPFSNQTCLIASKGLNQTSRFPLDLVTASSCLISNCLMTPKLIQSGRKATSTNTYTMESSWLGSKQCCQTLEAWKGESLYMMEPAWIRKEATFARIFSSLSLTVATLVSGQSTVCLPQTQIWPKGLDFVWTLIVHNMNRTLSCLLLTLELHTDASTLQGFWKPKLAIQDGLHRQSAAVKHLNSMRKSRWPSWIADPRCFWKKVHQTCTLKRDCSEVTRLEGHAQFPLKGGQTQGCKKREDLGPSRLELKDLEKMSLEDVLQQARRHRVGVYLWKTHIDPAKELLTVPPPEGFKEGESFEGKELYLLLCNHYCKYLFGNIAVFGSSDKTQFPAVGFDTPPVHYNLTTTPKEGETDEGRKARAGSSGEKTKIWRIDLSNVVPELKTFAATSRQNSLNECTFRKLCEPFADLAREFLHERWSKGLATNIYKKWPKAFEKSPWVAFDFATGLKMNRLTPDEKQVIDRMTKRLFRTEGQKGVFEAGSESNLELEG

SEQ ID NO: 516 - protein, 1962 aa, Citrus leaf blotch virus
MALMSNKTAIESILGNFEKKHVDAIYNAAAQTILSHSEFRNKHFAYSLNSYQKKIASKVGIELYPNGYLPHSHPLSKIFENHLLFDVLPGVVNTSRLVMCSIKESKVLVFKGIRDKSRRQVSDLNALNSLNNSHTSFINRLVASKDVSRYTEEADAFFQSKKGSPELFSRNFIKSLENKEAVFFHDEVHHWTKAQMFSFLKSTKVKRFIFTVVYPPEILKKFANSQNPKVYDFKVDKGRLFFFPDGVKTEAYEQKLNMEWLFSASHLRSGDCVWTVTRHKSIYAHHLFEISIGELVTDSKLFFSDYNSIDMSKIFLDRFRSYEVFPISIEHLYKVYSYLLCLKKPDLESGLAKLRQIIGDDVEIKEFLFFEQFCKRLIERQTSWGLFGHSFFEKLTDMALSSLPNSIARIFPQWKKKNTFEFLFSLGTLVVDVERKVCFEHVLEEWGFEVVITDENAYLDPLSIFAINENFNEDRVDDGYLERIRLPFWNLNDYDLKRKRVNAYNILSYRFEEERKIESAQKGPNKMLQIEWYGIKEFKVDPFISNSITEFTLLEALLGKRIDPKKYSYSKQACTLSNYLTFLCAEGLDGFNLEEHLERRLKAAGHDVSDDEEEELTSAEQAGPIKILADPLGFMKECLEEIPIETEPSLEERGQFSTDYHSEKFEINYNDIFNPHNCMNTHGDEIPTPSDGNCFFSAFTETFEVERPDTLRSDFSDWLMEFNGGSYASLAEMIRPNGVFMEAELIYLFCVFRGVTLIIHDRTHEKENVYAVHRGFEEGHMVHRGNHFVGIETYNISTLTSDPLLGDIPCGFSEEITKFHFRPDHFNCAQFRGRKAAFITKVDADYGHNGMVYPHNSWVPSLEEIIQICGQGDDFNCALINFYEANSSLGFHRDNERVYNDDPILTVCTFGEGRFTIEFKDQVTSFLMTAGSFFLMPKGFQKKARHSVSNEMSRVSITFRKHVRRLNGSPIAIREENYKNTCLINAFSKAMKRSKQAIIAKLKTVNSPFWSRYLSEGNGGSIEDCQSACEALDVTVDLNVNGKCVVLGKGALRISMALRNNHFSVINAAQLMERTFVSHLLEKGNVNVLEGFDAMLSGDVGAAGVNKIQFAANFEFARILANSFLNMTTGICLGKALDNGEKYFLHILKDRVKQIGIDVTMVCGFAGSGKSRKLQSWLHSRKKGNFCVVSPRTNLAADWAFKLELEPNEQRKVSTFEKFIKTDKSKLDLIVIDELTLFPNGYLDLLVYELADVNRHCQIILLFDPLQARYHNKMDESILTFEHDVDRLIGGQNIEYIYSTHRMSRYFNRFFDVPCFNQADRTEEQRLWIFDDVYSIPSICSDRQEPCDVLLVESDLEKKAFSPIINVMTFGESQGLTFNHVCILLSESSAASNEFRWMVALTRARTRFSLCSTFLGGIEEFKVKRKESLITSILQGEKITFNRLNLMLKCNLIRREKENGCRDEVDREERLEGDPFLKPFIFLGQRVEKDEDEVEEVKIREPTCQTHLYITEPNFGLCYNFDFIREKEQREYREDMLVTNQFCDSYDKVHINGKRETPGPLRFKAIYPKHSADDDMTFWMAVRKRLVFREEEENYQRLSRAHLVGGLLYTNFKKKMGLEFTFDQGLLEESINAFEKKKLEKSCGTIKSHSIRSDIDWALNDVFLFMKSQLCTKYEKQFVDAKAGQTLACFQHLILVQFAPWCRYLETQIRNQLPEEIYIHSNKNFDDLNAWVKKFFQRDICVESDYEAFDASQDEYILSFEIHLMKDAHFPQKIIDAYIDLKCKLGCKLGHFSIMRFTGEFCTFLFNTLANMAFTMCRYEWRRGQPIAFAGDDMCALNNLAVCHDFDDLFELISLKAKVERTETPMFCGWRLTPYGIVKEPELVYNRFQVAIEEGKVLECLENYAIEVSYAYSLSERLYEVLKSERQVQYHQAVVRFIVTHIDKLKTKVRDLFLEQSSDEDI

SEQ ID NO: 517 - protein, 709 aa, Apple latent spherical virus
GPEQMYIPTARSESFGSVCLLGKWTGPKPYFLENSSLTPSLIHDCIDIDMTTEPAILSKKDPRLQYTNNKDFDPFLSGMGKYAVEAHSFDEDEELFEDALDRVFSEIPMFTCEDLSNDQVCNGIEDDDYAEGLVMQTAEGYPFCTMRPPGVTGKTWLFAGSPGDWHIVPNSLLANELNVKELNLSKNIFEPVIGIDFPKDEKVDSSKVYIKQKTRLFTILPVDYNILVRKYFLSFVSQLMALHNEVPTKVGIDPISNEWSILCHSLHSKGTNWFNGDYSRFDGITPRNVLQGIVKRISRRYANKSSFAITDPTLSINGDLARSLLMDMCSTRYGLTNGDLWYVTSGIPSGFPLTVIVNSLVNSFFVHFAYMKLHSSEVHKALYPLYSFRTLVSYAVYGDDNLISVHDTIKDTFNLVTISNLLLEHGVTLKNGADKNEEILSPFYPIEKVDFLKRRFTTLQGHIVAPLNTVNITERLHWVRKGLGDADATLENCKSALFEALFHGELYYNDLRGKIEKACKVKGLPLIVPDYQDALSLFLTGGSYAKAIQAIAMNLPDRISLYKSEFYSVQIYPQIFYVTNERNVTLQKLLETTTLRNICYVSRNYESRSSSRGLFTLKGEGWTPAALKARLSVYKAMAKPVYFVDEANDGLAMFYCLDYAFRVCGLTRSQIAKILNAVFGGNPEVCQRIFQFFSQVEPTNKYIPPNQRR

SEQ ID NO: 518 - protein, 2195 aa, Soybean latent spherical virus
MSFHCPSSTCLGYTQSFSRRDMREQGDRCPHAMCGALLVKKVPTLSPQGARPVVSKTTVVVPPQATEEVLYYGCAPRPAFLEAVLAAPKLKMAPPVVDAMEVAYLRGVAAMEAEEKKLLRKEKAAVVARAKARRAARKAAKKQVAEMKATVALKLATRQKTARLSAAKRAMKAKRKAAKEAARLALEERRAAGLTRKSAFRRSLKKKATKMAGRKVPKTSTSTFPKVESFSCFPSSPLPAFIREEQPWVAVNTPCPHPEGFDLAVDPAFVAPIVGPIVSVPFMAPVVKAFNSLVEILAAINYEAAVDLRAYILEIASYENFFALRRIFVGKALSWMALILPLYPYAGIFDTYLPLDMVEDKNCDAYLASLQQTAVMVLEVTQGPMDAHSIFDIVRSVGSKVASIKDKVVGCIVEKSAALLDTVIDTAKGMFFGVLGPYLARAQKIGEEIKKFWDNCVEWATKLWQGAHIALQALGIYAVWAIVAMVLVGVMYILETILICLGVMSGHGVLVVALTGAVMTFLGFTVFQMGREYIHFLTALRQIIFLAVIPQGGLTQVNIMDSSVDVTEPHSLLDTAMAPVHFLETVASGLTFFSSTSVTVLGKLGNSLEGIRKGFNCLRDFTSVLLEQFGNAFEYISGKRTSFFRDLACAVKVDIARWTQDARETIEYFEISGSLDRYEYYRARELIYQGQDLIDTANKARSSHTSVKFLRTIGKLVEELKEIRAKCARSLKFPGWRRQPFWVYCFGESQCGKSTLANYLMPLLMSHMGWDPQDVYSKDPVDGYWSGYYQQKGLKINDLSAVNSKDVAPLEQQLIPLISTEEKMVSSAEIEGKGMQFASEIVVSSSNFNDAPTGAEILDADAYRQRRKVLMRCRRAAEWVHNADGTRTEKLDAEGKIVYKPYDPSNALSCTEVQWIHPVSFTALPGPCGQWHLAEFTIPMVKEAMDAHFLQEETKMASWKSSLGMKSQTARKMGSYLQDMIKGIGNFVTLKGAKDSDPRYLLVAVDGKCYALDQQGKATPYEDCDVVEEIERLTLLQYRSYFADLVMEHADNTYYQDSFHSSTVRDFLLALMKDGSTVLSVDSLGSSTQDIHKELWAELGLSEKIFLRVSQIARNQLRDAPHFKEDVAHNFLETMRHLRDAIVDRKEQILLFFAAVALVGLFSWGFLSLIKQFACGSLGFGAGIALREQIAHSSVMSSGSVTSAFVARNMPVVWGKAARYATAHSSKEEVGANFDYFEDASAHLLARVVGSSGQSETCLLFGHQAIALCAHQLRLFPDNDRVTIHYFSKERRPVCFSFTWHYINAIEWPDCEVIVYRDAQLTPLPVYSDDNYLCGEQTLPTVLTITGLSIKKKKFFDDSTLCPSEKILDGEMPIVRSWKDTASLRTQVQTILSETHRRDINRYYTSSYPSGKHDSGGIITAVINGKRKVIGMHCAGAQNGKIYVSTIGLLPTRNINDAHSAADYFVPSIGREEKGFCKIGWIADPSKRPHAATKTALAPVPKELALPLPEGVSVKIPSILSAADPRLRDEVNPEFKDYDPLRVGMDKFANPMDPLDDEVLQRVCEDIYETWYDCLPILDDEKVFLQKTSLEVALNGIPGEACYEAMRLDTSEGYPFVLERKPGESGKLSYVHIDENGVRSLIPGTSVFRDYHELSASILTQVPVLNCIECPKDELLKPSKVLEKPGTRLFDVLPFTHNILLREYFLNFCVFLQQNRVHLPCSVGVNPYSREWTWLFDRLAAKSDKALNCDYSKFDGLISHQVYMHMVATINRLFRDGEEANCARKNLFLMFTSRRSICYDQVYMVKGGMPSGCALTVIINSILNEILVRYVYRITVPMPAKNYFNKYVELVVYGDDNLIAIHDDVVSFFDGPIIKEKLAEVGVTITDGTDKSSPTLLRKPLESLDFLKRGFRKIEGGMYSCPLDKGSLYSRLYYSAGGKGGLFQLDILHDNVKSFLEELTHHADHYEEFQRVRSFYIKRIPSWSATLPTYATCLNMMEGQRNSATPWQPHKFIETRPSGCETKMMAGQDNHAQKICVTERIIICGEKYTPPILETSFVVSIDNPLYIGERGEYVKTEFGSGMGRLPTDAWIKAFSSPKKHPQLFEAYKMGATIYFRSCMPYLNAWCAVCKFALAHGIDQSSIIAMYESCKPRGAGDIAPLVAVKAYTKFVNRPVFKFKETVHKEVLEAHNSVRVA

SEQ ID NO: 519 - DNA, 10749 bp, Citrus tristeza virus
  source 1..10749: mol_type = other DNA
atgtcgaaactcagaggaagcttctggtcttcggccatcgctgttaacagcgattacacgatatcgcgcatctggcgcaaacttaacaccatagtagtcctgcactactttggttttgttagaatcaccaaggtgattcgtgacaaatcggctgatatgccgatagtccctttacggaaatctgtatttccgttttctgttcgcgcggctgtcacgagcttcgtgctgctgggcgtcctcttgacgctccgcattcagggtgcctctgtggccttcccgttatcaacgcatctggcgttgttcgtccccgctctgttcgcgggtttttcgaggttttctctgtgcaaacctccgctcacctctgccgctaagaggtccctccgtcaggcaaagcgggaatctgtttccctttctagccgggcctcttctcgcttctctagggaagtccctcgcggcacacgttcaagacttcacagacgtgtggtgagacgagctgacactgccccagttgagagtccccaagacaagcctacccgacgaaacagccgacttggtaagacttctcacctcccttacgtgggggaggcagcgttggatgatatccttcgctggatcgaagaggttaatcctcatccctcgatggtcgctattccagtgcccatcacttttggaaccatgcctgcaacggcttggtgttcccactctgaagccgcagttttgcgtgccgccttgactatcacgcggctgaaactgatttctccactcaggagaaacacgtacggtacgtctataatgacgtatcttctgccactaaccgtccccgtacggtttctccccgcaagtgcgtccatttttcccagtaaatctaaactgggcgttgaggtcccctctggtagggaccttcacactgcgttcgtgagatcttctcacgcgagcgctttcttctctgacgcggttcgcgcttcgtttgttccgtccagcgcggaacaattttttcacttccgtcgtcagcggacgcatgttcttgctattacagacccggtcctgtgtggtacggtgtctgttttaatgtcggacggtgttaacacagcacgtctcgacgttgttgctccggcgtactatgcgtacgctgaatctttgggcgccagagtgcgctttttgtgggagtcgtccgacgtggacgacgctaaagttcgtgacggtcaatgttatgtccgtcatgtgttcgacgtggctctctactttgggagacgcgccgacctttccgtgcgtagagcgctgggtatgtaccccacagtgggtgcactaaaggcttatcttgttcgcgaatacggtcgcgactctcttaaggttcctatgcgtgggacctacacttttggcagtgtgtttcactgcttgtcgctaaatcttcaagtcgacctgcgatctattcctaaccatcatttagttggtgggacgtctgcccacgtcttaattgggcaggttcgagtcagtgttcctggctcgattgttaaaccttcacgttcggccgttcgtaggcgtaatagacgcatgcgacgtgatggttttctcggtagttccggttcttcttcttctgcgggggagtcgactcgctgttcggactgctcttctcctcgcggtttaccttctccttccgttttaaaaccttccctaggtcggatcccgagtatagatcggcggttccggtttcctgcgggtacgcagttgcgcgtctccgtacctaggcgggtcgatgaccatgtttacgtgtcgactggtagcaacttcgatgagttgtgccatgcagttttgacacgtatgtcaaaaggtacaactctagaaatccttttacactcgattcgagagcggaagggactacttggttttgcggcgtgcttccgttgggggtcttcacacgtgtttgtaaagcgtggcaactttactgcccgatttcctatttcggcggtcaggtatgagaatcagtatgccgcggttatgatggatgtggggactagttgggttccgaagggctacgttcccgatgttgatgttgtgaaacgtcggagaagtcgtaatcgtcgttttcctctttcccatcgtgcggtggatcagtcggtccccgcgttacagtcgagtcctgtcgaggttgcttcggtttcgagtgataagccttcatcgtcgcagaaggcttcttcaccttctacttcttcttcttcttcttttaactcgacaaggagttcagactgggtgaatgtcggtttctctcatcgaactactaataaggttcgtgaaccgcgttatgctggtcatcgtaggatcggaaattttactttcccgaggggcacagtgtacaacacgcctgtcgatgagcgcgcctataaacgtgttcttagattgcgagataccacagcctgttcctttctccgtatactgctagctcgtttgtcgggttacagacctttaagtgacgagttctttaacaagtgtgtcacttcccggtttgtcgcgtgcattgaacctgtggaatcaggtctcgttaaggtgcatttccgttctgatgttttccgtgcctctttcccgtttgacggtcaacctatacaccccgccacggctttgacattggaagtggtggtctcttgggattggatggttacggcttttcagaatcccttgaaggatggatattgctacattcgccatttcgccgaagttagtttgagcatggggcgaattttcttcaggagggacgtcgacttgggacctttcccatacgttttcgaagtgcaacaccgtcttgaaaggttgtacgggaaagctgcgttaagatacggtgttaggggtcaatattcagccccgcgctgttttcactgttgctacaacgattcaccgagaccgatggcgtcctttaatgggtaccataagatgggtggtgaagataactccctgataatcacagacaccgacaggttgcgtgctgtggggagtgcctatgaaaaagtgaagagaaacataccagattcgttattggttcggtctgtagaaaaggaccttatagagtttaatcagactctagtcgacatgcatcgatccagaccgggcgttgtcgtacctttccaaatgagtgagaatcagcaagtgatgcttactagggcgtacccggaatttaatattaattttattcattccgtacattccgatcatccggtggcagcaggttctagggcgttggagaatcatctcgttcgtaaacacgctggtaccgattattcggatgtggggggttgtccgctgtttcatttacgtgcgggtcactccggcgttcacgtttgtagaccggtgtacgatgttaaagacgctcatcgtagagtagtccgtcatcaccaacttagtaaggtttcgctagatcagagtgacggtgttaaacaagttggctggaccgtaaacacgaattctgtatgcggtaacattttgggagagtgttatcatgcatcggaggcgatggttatggttcaagtttatgacgtaccgctacgtgagttgtgtagggctatgataaacaagaaaacttccgtgtgttatatgaccatggttacacctggtgagttgttggacgcccgcgagtccttttttattaaggacttggattgttcggttgagttagatcccattgcagacagggttgtttactgtttcaacaattctgcgtatacacacacgtactccactatatgtgagtgtatgcgaactccttgcttggtagtggacgggtttttgtttactatcgaaatggtatcgctcaggtgtagcgttaattactattgtatcaccaagtcgtcggtctgtccgagaattagtgagactaagcggttgcgctaccgtcggtgtgatagcgacttgattagaatcaaaattccccggtactccagtaagactcgtagttgtttacctgggtgttactatttgtacttggacgccaagtttgtaagtcgcgtgtacgagtacgtggtcaataactgcgttgtggtgaacgcgaaaacttttgagtggacttggaattacatcaaatcttgcaagtcgagagtggtgatcagcgggaagattatacaccgagacgaaccaatcgctttagagtacttagatgggttttctgcggttatgctgtccgctggcgtgaagggtaggcaaaacgcggacgtttctagacgcttagccgctttttcgggtgaaacttcgattttcgagttagtggggtttgctatatccgagaagtgccgcgacttgttcttgggtattcaggacgctgtggaaagatgcgtgaagtcgtacctcaggaattcgtttaatatgagtttcgtggacttgtccgaccccttacttacgattagcgaatattcagaattggacgttcctatcgacttaccgggtttcggtggaatagtggacggtaacgaaactagacttatggaagacggtgttaaatcggctttattacgtaaagcggttcaagccgaggctcagttgagtcttaagagaggcaatacttccgaaatcgttccgtgtgatgacgatgacgactcgaacggtgatgattcgcgtgtttcgctcgatacggactggtggttcgtccttcggggtggtagttctggcgggttgcgagctggagccgccccttctttgtttaggtgtttactcaggaaattgggtgggggtttatgtttggcaaagaaagtgttggaactgttagtcaagcgggtggttgaatcgttttctcgtttgaagcggaaaaccgctcgtttaacgtccttcgctaatttgttgcttgcgaggctctcttgcgggtttttcgatgacactgttttttctgcggtctgggaaatagcgatcaacctgaccaggatcgtcgatggagtagtcaagacaaaactggggtgctttcgtaatttatttcgattgattcccaagttatacgctggttgtaaggacgttgtgaaggacgttagtaacgcttacaggtcggttgtctcgttttccgctgaggttttgggtaagagttactctaaactttgtcagttttgcttggaaatatttgacatcgggcttattgaggtttctgctcgtaatttgggactggaaacatgcgtttcaatagcactagctatttttgatgtgttgattacttttcctttggggagcgttagttttcccgtcgtttgcgctagggttttcggtcgtctcgctatggaagtgggatcgaactttttgtttaagaaagttttcggtaaacccgaaactcttggtgaagatactttccgtaggactgtgagtatggttttgaggcccaaagcgtttgacaagctttccgtggatgcgaaaggtttagttaggtgctctggtgttattcctggagtgttaaggataatactatcttccttgttttccgaagatgacgcttgggtgggttatagtaaacatgaagtttcttcccttcctattgttaccttttgtgtgaagagattgtcttattctctggagcggtgtaaggaagcgtgtgtcgcatttattgttgactctgctaagaagattttgaaatctttaacttcagagttcaacgaatccattcaaaactccgacttgaccagtggtgctaagtccttgtacgggcacgtgagctcgatactttacacctctagtggtgtgattaataaagcaggaagcgccgtcgctactgttaaagcggtcgggagtgatatcagtggtcgtgtgaaacgtatgcgaccccgattttctctgtcccgtcactttgacgagcagactagtgagtactactctgctagcgattgttccgaactagatgagtcgttgtttagtgaaacgcctggtcttcgtggaaacgccaggtgtagagatttgtttcgtatcgtgtctagacgcgcggtagcgtgttgtgagtacgtgacaattcttttgaaacggctagcgtcgcgtgccggtgaatactcctactcgtatgtgatggatacgctcgtgagattgtatgtggcgaccgatgatgttgttagacggtgcaggtcctttacgttcgactgtactgataaagcatctaatttcgtcaccgggtttcttagttggcgcagcttacgttctggtgcgtactctgcaactccagggttgggtggtggtagtagaggtttaacgtcgttttctcacaccggtggattcacgcgcgttatcggcgctcttgggaacaccttatcggtggtgtttgatgaggaattcttcagaactttgctgcatcggttgagggcagatgttgtggttttactggtggagttcttgaaaaaccttcccgtttgtttgttttcaatatacacttttattgaatgtcggggtaggatctttcctttaagagagttcctatggggtttttgtcgtttcgtttgggatgttatcgaggggttgtccatcaatacttatcaatacctctctgctgtcgctgagaaagtgtatcgaggtgcctttaatcgtcgatttaacgaagaggatgagaggacgcttcgagtgatcacggaagcagagggaagaatcgaatttttgcgagttgttctcgcggaaatggaaaggttccgtgctgcgtcgaacgaggtttcttcgtcgaggtcgtctgatagtccttcattcccacctacttacggtgaaattgaggagttaaatgatgattcctccgatagtgcgctagtgataggcgtcgacaacggtaccggccgcactatcgttgacggtgagaccgattctgcgtccggtagcgatagtgacgtttctatcccgttggatcgcgattttgaacaaatcgggcgtcttggcggaaacggtaacgtcgatgtcgttcggctgggtttgaaattcgttctgaagttgttacgcaacctattcgatgctagaagttttaaagtgttgtatgggttgttacttcaaacccttttttatggtggttcggtaaataaatttgtgtgtcgtctggtctttagtcttgggacttgcttacctttcgagttactccgatttgcgtgttcagcgaggcggttgttgaagagtttggcatcatttgtttaccagactaaccttttcagcgaagttatggtggagcatttgtttagcgtttcccgactgctttatgattcccggtacttcgcgactgtgttttcggaattggagagacttaacttctatttagactatttcctttcgctcccgaagagatatctattccctaattctagggctcgtagttgtgctagggttccggttcccgtgattaggaccgaaggagtggcaccagtccgtgagagatcactaaatgacatactggactctttagactctttaaaggtgtcggacctcaaagggaagtcgacgttcgttgatgatggggagtcggattccggtagtgaacattcgggtagttcgatttcgttcggttccgtcaacgaagaagttttaaatgcggtaaatggtgacagcgtttgcgaaaaagccccgttgatgaagcatgttaccgcacttagcaggttggaacgccaccctagtggtcgtaaagacattcctgtttctaggaaaacttttgtgcgtggtgaatcttcgggtgtgaaatcgaaggtgagtatgtgcgattacttggtgaccttgaattcttcgtttggcacagtgcctgacatgtaccctgttgcgcgtgacataacgtataagaaactgactaacgccatgcgcgaattctattactcgcaaaaaataaccttgtacgaacttcacgggaagttgagttcctattgggacgagttgaaggtcgcaggtttcgatagaaagttaacgagaatggatttggacgatgatgtctatgttgttgactttaatcggaaattgttggtggggagaaacggatctcatccgtttcgtaatacgttaaagtcctattgttttatgttttgtaacgatgggttggttccttgcccgcgttctcagaaatatgattatgctttgatttctaatcaaacgtcttttgttgccgcgaattcgttcttacgtgccgtggatggtaaggatttgacttttaccaatgaggaacatagccttatcgtttatgaagctcctcccggtggtggtaagactcattctttggtgaattcgtacgcggattattgcgttaaagtatcttgtttagtagtgaccgctaacaagaattctcaaaccgagatatctcagcgcatatctaatgaattgatgggcaggaagctagctgctaagtatgttaccgatgcagcttccagagtgttcactgtagattcttacttaatgaatcacttgcgacttacgactcaactgctgtttatcgacgagtgcttcatggttcatgctggggcaattggagccgtggttgagttcacgtcttgtaaagcggtggttttctttggtgatagtaagcaaatccattacattcaccgaaacgatctcggggtttcctttgttgcagatattgatgcgtttattcaaccggaacatcgtatttacggcgaagtgtcctataggtgtccttgggacatttgcgagtggctttccgagttttacccgcgacacgtagctactgctaatgtagggagtattgggaagtcgagtgtgtcaatagaggaaatcaatgggtgcgatgacgtaccttacgacaaggcggcgaagtacattgtgtacactcaggctgaaaagaacgatttgcaaaaacacctcggtcgcttaaccgtgggtcggaacaaggtagtaccaattgtaaataccgttcatgaggtacaaggagagacctataaaagggtacgtctggtgaggtttaagtatcaggaggataccccgttctcttcaaagaatcatattgtggttgctttgactagacatgttgattctttggtttattccgtacttactagtaggaggtacgacgatactgcgactaacatagatagggcgaaggaaatttttgacaaatttcgttcgtcgaatcactcgtacggttcgtcatcgttagagtggtaccttgaaaagtatcctaccgaatataagggtagtaaagcatcctctgctccgataagttgcattaacgaatttcttaatgaggtcgtcgttggttcttctgtcgtgcagttgggtgatgtgtctgaagaactaagttcacgtccctttgaatcgggttgtgataatgttactgtagagacaccgcccctcctgactcgggtaacttacacgaaccggctcgcgttcggcgtagtaaggtcacaagcaattcctccaagaaaagcgtcactgcaagaaaaccttctgtcgtacgaaagtcgtaattataactttatcaagacggaacggtttgttggaccaagcgaatttggtagggcgatggctgctgctgttatcgaacgttgtttcaaaatggaagagatggctaagataaggtgtgatattatatcccttactgaagctaacattttaaaatggctcgataagcgcactccctgtcaaataaaggccgtacacggggagttgaaacttcccttttcggtggaggagcaaatttccaacttcaaactgatggttaaacgtgatgctaaggtaaaacttgacgattcaagtctatctaaacatcccgctgctcagaacatcatgtttcataagaagtttatcaatgccatattttccccgtgtttcgacgagttcaaaaatagagtgttgtcctcgcttaatgacaatatcgtgttctttactgagatgacgaacgctgggttagcggaaattatcagaagaatcattggtgacgacgacaacttatttgttggggaagtggatttcagtaagttcgataagtctcaggatttgttcattaaagagtacgaacgtacgttgtattccgagtttgggttcgataccgaacttctcgatgtgtggatggaaggtgagtatcgcgctagagccaccacgctggacggtcagctgagtttttcagttgatggtcagcgtcgttctggaggttcaaacacttggattgggaattccttggttactctaggtatcctttcgttatattacgacgtttcgaagtttgacttactcctcgtttctggagacgattctttaatttattcgagtgaaaagataagcaacttttcttccgaaatttgcttagaaacaggttttgagactaagtttatgtctccgagcgtgccatatttttgctcaaagtttgtggttcagaccggtaacaaaacgtgttttgtgcctgacccttataaattattagtaaagttgggggctccacaaaataagttaaccgatgtcgagttatttgagttgttcacttcttttaaggacatgacgcaggactttggtgatcaagtggttttggagaagctgaagttgctagtcgaagctaagtacggtttcgctagtgggaccactatgccagcattgtgcgctattcattgtgtgcgatcgaactttctgtcctttgagaggttatttcctttcattaggggttggtatgttgttgacgctctaaaactcagacagcttaggaaactcactaatttgatctgtgaacgtgtagtttacgacaatcgggtgagttatttttcgtacttcgataacccgttcactaaacctgacgctaacgacgataacgtggacgacctcggacaagcgggtgaattagcaaccggctga

SEQ ID NO: 520 - DNA, 3171 bp, Spinach latent virus
  source 1..3171: mol_type = other DNA
atggatacaattgttcaaatgaaagtattgtgttacgagtcgatgatattattaatgataccttcagacgtaaacgcaccaaggccggaaactgccattggtaggttgatttccgatgccgctgtttcaggtgttttgcgacaatgcgatttcactgcagcggaagcctctcaatgttttgttccaattatcaccggaagatcagaatgcattgagacgcgattttctggaagagaaatacagtttcgcaatttttcgtattcctcacaatcattcgctgctgcgcatcgagtgtgtgaagcggattatatttatagtcgattccagacgagaaataccacgatcattgatattggaggaaatttttgcacccatagtaaaatgggtagagataatgttcattcatgttgcccgatattggacgttcgtgatggagctcggtatactgacaggttcatgtctgtggcgggggctttggaaacccagcctgaccgtgagctcagactgaactattgttccaataaatttgaagattgtgatgtttccgcaccatgggcgatggcgattcactcgatttcagatataccgatcacaagtgttgttaagcattgtttccgcagaggggtcaagaaattgatagcctctgtgatgatggatcccatgatgcttgttgcttctcaaggttttatgcccagattgaatgttcaatgggaaattgaacctgatgaggagaacaaaggttcccggcgaatttcttttcatttcgtcgatgctcctggattgtcatatactcataactatgacgtgcttatgcagtacatgacttgtaatcaagtcataatcagtgggaaagccgcgtatcgagttgagcgcgttgcagatctgtctggtgtttttattgttgagattaaccctggcggcaactgctggaatgaaagactggatctagttcccatgcgagatgtttcatgcgcgtggatgacttcgttaaaacgtaagaccttagtgcgggttgccatcccgcaatatattcattcatgggaagttaagtatgtgattgccgacactgattttgttagaagagttgctgaagtgtcgttccgtcagtataaaccagaaacaccattacaggatttggtgaaatctgttgcgacgatgatttcctctgcttctaaccattgcattatcaatggtgtcaccatgcaaactggtacaccgttggccattgaggactatgtcccaatggcggtgacttttgttgccttcgctaaatcaagatatgattcgataaaggaaggcatgaaaatggttaggcagagaggtactaatatcgcggatcctaatgatcattatgattatgagaaagatggatcggatgttaagagtttttcaaatcacataattcccatgaagaataccatcaagtctctgtttttccccatgaaagtgaagatgaatgataattctatgctcatttatagtcaaggaatcttgtcaactgttgttgatgagataaaaacactttttggatgggatgtttgggacactgacgatgcggtaatacagtctctgccctctttttataagatggaggatgtttttcaagttacgtctgaccactattgtttatcacatacattatctgtggattggtggttggagggactgtatgattcttaccatgacatgcgtgttgcgcataaaaagaaacttgatgaagaagaatctcggaagaccaaggtcgagaatgccttattgaaaattgctgaggttttggagaaacctgatgttagcgatggtcttaaagctctttcagaattgcccataatatcatcattattggagaagaagagcgaagaaatcgttacaaaacctcaatgcagggatactgaaaaaccccatattaatccctatgctgatgcaatcaaagaggcgcaggcctattacgaagagcttgaggtcgtaaatactcgcaatttgagaggtgttggtgattacctcttttggcgaaagaagtcgaactatgccagcgtttggggcgctgatgaatcgagagtggttcttgaacctatggcaaggaagttttactctcgagatagaaatgtttccatacccgagtatgagcgaggtatgacggttgatggtttcgtctccattaaatgggtggacggaaacattactgaggacacgtggaagtgtctttccaaatacgcagttgttttgctcgactcttcttgcgtgtttgatgccggttcacgtattatgccaggtctgaaaaaggcattggtaatggatgcaaatttcaaaatcgtgatcgaggatggtgtggcaggatgtgggaaaacaacatctctcctcaagcaagctaagccggattcggatttgttgttagctgccaaccgtgagactgcaaatgacgcaaaagccagcggcgttattcctaaagcgcttgaataccgagtgagaactgtggattcttacttgatgttgagaacgtggttcacagccgagagattgctcgttgatgaatgtttcttggtccatgctggcttggtctatgcagctgccaccttggcacgagtgaaggaagtaatagcttttggtgatacaaagcagattccattcgtgtctcgtataccaactgtcaaactcagacacgcgtctgttgttgggacgttgaagccaagaacaattacctacagatgccctagggacgtgacggcagtccttagtgagaaattttatggtactaaggttaagacgtttaatcttgttaaacagtctttggaattgaaaaacatagattctagtaccgaaatacctgtagaaaaggatacgctatatatagcgcatacccaagctgataaacatgctttgatgcgtttacctgggatgaatggtatagaagtgttaactactcatgaagcccaagggaaaacaagagaccatgtgatacttgtgcgtttaagtaaaactaccaatttattatattccgggaaaatgcccgatgctggtggttcgcacaatcttgttggtctgtcccggcataagaaatctttgagatattttagtgtctttgccgatgatccagacgatcaaattgcgactggaattcgctggtccaaaacattggatgagcaagagttagcagcttatagagctgctggttag

SEQ ID NO: 521 - DNA, 2394 bp, Spinach latent virus
  source 1..2394: mol_type = other DNA
atggattcttaccacttcttatctcagttgtgtgacttgaatgttctgactcatgcgctttatgttaatcaagtgtttgagattgtggatcagtccacaactagttatatgcagatgtggctttattcccgtgttattgtcccagttttgaaatatcatctcagtggagatattatattggataaattgcacgatgtgttccttggaacctttcgttcaatgatggtgccgatgattatgttgaaccgactttcattcgtcgtgaagatgacgacgatgaaccaccaccggaaagcgtatttgccgcttgaagaaagggaaaaaattcatgctgcgacgtttcttggtcatgatcattgggcaagcgttacttcgggatcatctttttatgatgatctcgaaattctcgctgatgagaccgtgaacgatgatttgcattttgataaagaatcttccatgccagatgagtatcagatcatgtggaatgatggtacaattgattccgtttggtctagtcagtttgaatgcgaagaaccaccgaaaccgaaatttataccacgcccttctgataaggtgtgtgatccagtggttattcaagatgccgtgaacgatatattcccatttcatcatgagatggatgatcgatatttccagacgttagtggagacacaggatatttcccttgaggtttcgaagtgttggatagatgcctccaatttcagagattttgttaagggtccaaattcttatgttgagcctgtgtttcaaaccggtgccactagtaagagagtgcatactcaacgtgaggctcttttagctgtgaagaaaaggaatatgaatataccggaattgcaatccactttcgatcttgatgcggaagtcaacacgtgtttcaaacggtttctcacacacgttgttgatttgccacgattaaaaaggttgcaacctatgactggtgttgaggtggaatacttcaatcaatacttgcttgggaagaatccacctgtgaaggaatatcaaggtcccttgacattgactgcacttgataaatatatgcatatggtcaagacgattgtgaaaccagtcgaggacaattcgttgaagcatgagcgacctttgtgtgccactattacctatcataagaagggtatagtgatgcaggcctcacctcggtttttgagtgctatgtcaagattggtttatgtcttgaaatcaaaaatccatattcccagtggtaagtggcatcaacttttcacgctggatgctggaaaatccgatgccgtaaaatggtttaaagaggtggatttttcaaagtttgacaagtctcagggcgagttacatcacaaagtgcaggagaagatatttaatgctttaaagttacctcccggatttgttgagatgtggttttccgcccatgagcgatcacacattgtggacagagaagcagggattggattttccgttgattatcaacggagaacaggagatgccaatacgtatttgggtaacactttggttactttgatttgtttggctagagtgtatgatttatgcaatcccaatattacctttgtcatcgcttcgggtgatgattctttaattggaagcgtcgaagaattaccgcgcggaccaggagaatttatttacaaccctgttaattttgaagcgaaattccctcataatcaaccatttatatggctcaaagttttagtaagtgttgatcttgaggatggtggaagagaagtgatcgctgttccaaaccctgcgaagttgttaattggtatgggaagacgagactgtcaataccaagctcttgatgatttgtatcaatcatggcttgatgtgatatattattttagagatgctcgcgtgtgtgaaaaagttgctgatttgtgcgcatatagacagacgcgaagaagctctatgtatttattaagcgctctgttgagcttgcctagttgttttgctaataagaagaaatttaagtggctctgttatcgtttaagagagcaagggtgtctgaagaaggatatttatcctgtagcaaaacctataagtgcccataatataaggaaagaagattcaaatggatgcgatgttaatcaaggaacagatgattcgttctcacggaaaaagaatcgtggatgctgggagtatgtcccaaagatgttgcagactgatgtgtctgttcctgttactgataaatctttccacagtaacagaggctcgtcggtttccccaaccgattgcggtgatggagggtgctccagatccgccagctcgattggtagtaaaaataccaaacctcgccatagatttcgagctgcaggagttcaccaacccagcggtcgtgatccagaccgtataccgccgaatcatcgacgaagtgcctaa

SEQ ID NO: 522 - DNA, 2364 bp, Olive latent virus 2
  source 1..2364: mol_type = other DNA
atggccggagtactttatgatgaggagtacgttccccaggaaccggattacttgtattgcccgtacgagtgggagggtgaagatcctacccaatgcgatgcaaatgttccgtccgtcagctaccttgtggaggctgtaaaaaaatcctttactgagggtaaccacgatatgctgatttcttgcgagtcgtaccacgccgagtgttgcgagggtcccttgatgaacaagggtttgaccctctcgacttactttatgagttatccgggcatttcattacctgcgttcggcggtggtgtgattcatgtcacttcagctcgcgtctgcatgcaagctttttatgccgtgaccccaggaaggtgtagttgttcgtgtggtacgcaattcatctatcgtgccaaaggtggaactggtctaacatttgacgccacgaacactatttctagtgcctttaagttcgaagacgggaaagtgaaatggttaacagaagacctaggcttggcattattggctggttgtttcttgaaatacgtgccaatacctcatgagattgaaattaagatcgaaagaaaggtcgagcccgtgtctgctctggatttttgggaaccagaaggattgatttctgacgtacatttcgtacatccgcaagagagagccttggctcctgagcctccaatggatgtagagatggtgagattagtccgtacggaattgtttgaacactttaatcccacccttcttctgaacgctcggtcggatttttccggtgagaaactgaaagaggttgagttgccacgagctcaatcggaacccttagtccctagggtctgtctcccgcgaggtgatgacgctttaattgatcagtttttcatagacaaggcacccgagcattttaatcgtgaacctgccacagatcaatggcaggtggaatctgatgactttactgtggatttccccacccaagtgcgattacgcgaacgggacgaagattggttcagaaggaaacccgatttcgctgtgtcgtccattcgtacaggtctcgagatgcctcgaattgctacaaagaaggaaatgttaatggcattctcgaagagaaacgttggagctcctcagatggtagaggtacctcaggagatccacgtgaagaggttggctgataggttcttccggacattcttgaaagaaggcggctgggataagggggatggtcattattgggatgattttttccatagaaagggtcgaaaggtcttttcattggagaattgttacgatgaccccttgtcctcatacttagttatgctgaagtccgctgggaaattctctctagatctgaactttccggttcgatcggtaccccaaaccattacttatcatgagaagtgggttaccgaggttttttcccccatgtttctgcaggtgatggcaagatttttctctcgtctgcaagattgggttgttgttccggctggtccgatggctgacttctcccgtgtttggcctagctttgaggggaagtgtttaacagaaattgatctgagtaaatttgataaatctcaaggtaagctgttgcatgatgtgcagagggagattttcctccgtctgggtttcccacccatttggtgtgattggtggtttaaattccacgagtcttcctatttaaatgataagaaccttggtatagctttctcagtagattaccaacgtagaacaggcaatactgccacttactttgggaacacgttggtaacaatgattatgatggccgaagtgtatgaacttgattctctccctttctgtggtttgttttcgggtgatgacaacttgatcgtgactgatcgacctcttgaaggtcgagtttcgttattcccgaacatgttcaacatggaggccaaggtgatgcgtccgggtcagaattacatgtgtagcaaatacctttgcactgtagacggtcgcgtaacccctgtccctgatccttttaagttgctgaagaaagctggtgcctcgtgtcctttggagcaccttgatgacttttacgaatcgtttctggattataccaaatacctggtgagggatgaagttagaacattaatacccaggttgatggcccacaggtatcaagtctcgatggatgaagctggagttgctcttgatcagattatgagctggcgaaagtcaaagactcaattctttaagcatttccagtacaggaaaccaatcaaggactcgctcgaggctgtgaaatccgacttcctttctgctttcggaaaagtagatgatcgaataagagtttggcgcgggcgtcgaaccaatcataagaaggaggtcgatgctttaaaggtcccattggtgagttttagggagtga

SEQ ID NO: 523 - DNA, 4950 bp, Citrus yellow vein clearing virus
  source 1..4950: mol_type = other DNA
atggccactattaggggtgccatcgaacgcattacagacaccaccgtacgcactacacttcaagaggaggcatgccgccaaatacgcgctgaacttaaaaacgtcgaacacatcaaccgttacgctatacagcctgacgccgccgacgcactcgaacacctaggcattggttctaaccccttctctgtggcactgcacacacacggtgcctgcaaagcgattgagaaccaattactctatgtagttggtaccttactcccaaaagaacgtgtcaccatgctcttccttaagaaaagcaagctcaacatcatgaaacgctgccctaaattccaagacatcttcctgaaccaacatattgaaccacgcgacgtttctaggtactgcgactttaacgtccaatccacctccaccagcatacccacacgaacggcttacatcagtgacacactccactttatggaccgtagagacctagtccgactattcctaaacagcccaaatctagagactctctacgccaccattgttctcccagtcgaggctgcttacaaacaaccgagccgctacccagagatataccagattaactatgacttcgacggtttccagtacatacctggaggccatgggggcggcgcctaccaccacgagttcgaacagctgcaatggttagacactggccatatccactggcgtgggcccgactgtaaagagattcgcatgacaattaccgcccaaatgctcgaaagcttaggtgcgaatcatcttttctgcttcaaacgtgggaaactactcaccccacgtgtacgcactttcggccgagatacccaagtgctcttgcccaaaatcttccgcccggccgacaaaaactttaacagggcaataccactaaccctagctaacaaactactcctgtacgctaaatccattaacacagtgaccttccgcgacgtcgttgccaagacacgccaacttatgaaggacaaggagcttgaaacatacaccggcaacgacctgttgcatatggccaactatttcttcgctgttggagcactgtcaggagttaactcctatgaccaattgcttggcctatccgcctgggaagcctgcaccgtccgtatcaagaacaccataacaaatctctgggaaaagattgccggaaagaaagagttcggcaagctattggaggcccttgagtgggaaacattcacatactcacgtcaagtgaccgaattcaccgttacgggactgcccgccctgctccccctcccagacatctcagaccaagaagagattttcgcccagcaggacgagttagacaaaatcactgccggcgctaccaagatacggactattgacattatgcggggacaagctaaccgcgctaacccaaaaactccgatcaactcaacaccggcccagggaccccaactgcccgatacccccgacccaatcgaccaagctgcctccaaagacctcgtcaccaagcttcagaaaaacaaacgcatttacatccaagacgacgggccggaataccttatgggacacatggctgaagtccctgcctggtatcttgaacaagatgataccaccactagactcaaaaaccgctgcgcttggttcttcggcccacccacctacagatatgggcacaacgacattgagtacaccaccatagaatactacccttgggtcgagcgtattggagccattttcggcaagtacaacacctgtcttgctcaaacttacgacgccggagcccgtattggataccacgctgacgacgaagactgctacgaccccgacgtcaccgtggtcaccatcaacctcactgggaacgccaccttcctgctcaagaccccaaccggcactaggacctggaaacttaaacctggtgacttcattatcatgaaacccggtgcccaaaggtgcacaaaacatgccattagagattgcacaactaaccgcacatccttaaccttcagatggcaggcccgcacttgccccactaacctcagaaagatcactaacctacccaaagccaccaaccaaccccaaaccactgaatggcgtcctgtaactaaaccacgccctagcaccaccgcttccagcgacacccagaccccacttgtcatagaccaggaacgagggtataccaccacctccgacgtgacaccaacgattaggctgcccgccgaaaatggtaataacaccggtgctggaccctcctccgcattaaccctcgccgacctgaatgataaccaagcgccgaccactaacaaaggaaaagagaaacttgaggaaatggtcgaaactggcccaactatcatggaacgcttcctcaacaccgttcaggaaccaacacaagatttatgggactccgcctctgaatccgccgcgagctacctcgctgaaggcctcggcatctctgccatccaagcactcccttgggcacctcacttggaactcatcaatgcattaggcttccagggcactgaaaggcaatacggcccagacaactgtctcatatggcctatcacgcattacagagaattgcccagaagcaacaatgtcgaagcccctccggaagtgcttgagctgctcgactgcatcaatagataccccactgacgtcccaatgctcaaaactcgagccgccgccttcggttcagacgtcaagaatctacgcataggggcacttgttaagaaccaggacaaacagtggcgcgcatcactcgcactactttgtgaggaaaatgaacacctcctccctaccactgtaatacacggcgctggtggctccgggaaatcccacttactccaacagtgggtggcgtctactgagcgcggaaatgtagtcaccatcttgcccactatcgaactccttcgagactggcaaaacaaatgtccacatgcaccgaaagagactttcaaaaccttcgagaaagcgctcatccagaacagcgcccccgtggttatcatggacgactactctaaacttcccccagggtatattgaagcctacgtcagcctcaagggccagtgcaaacttctcatactcactggagatcctagacagagccactaccatgaggagaaccctgaggccttaatctctactcttgaccccgccacggactactttggcaaattttgcgcatacaacatcaacgccactcatagaaatgccaaaaccttcgccaatgcgcttggggtgtactctgaaaaagaaatccccaccaccatcacctgctcatcctaccagaaaagcggttggccaacacttgtcccatccatccttaaaagaactgcgctcaacgacatggggcagcgctcactaacctacgcaggctgtcagggactcaccaccccaaaagtgcagatagttcttgacaacgccacaccactatgctctgacaaggtcatgtacaccgcactatctagagcggtggaccaaattcacttcttcaacactggcccaaatcacactgattactgggaaaagatgaacgccacacctttcctcaaaactttcatcgaccacacacgtgaggagaccttcgctgagcaccaacctgccgaacccacagtgcgtgagtacgcaccagcaacgcatttcccaccggctaacgagaacctagcactagagccgtgggtcgaaccgctgactgataaacactcgcgggaactcttccactctgccttaggccacagcaactgcgtccagactgaaaacaccgtagtccaactttttccccaccaacaggccaaagacgaaacgctcttctggaaaacaatagatgccagaatcaagataaccaccccagaagagaacatcagggcttgcagcatagccactgacattggcgacatcttgttcctaaattacaaagaagccatgggtttaccacaagaccccatacccttcgaacaggcactctgggactcttgtcaagccgaggtgcaactaacctacctcagcaagcctctggctgcactcgcaaatgccgcccaaagacaagaccccgactttgactccaacaaaatccaactcttcctgaaatcacaatgggtcaagaaagtcgagaagatgggctgccttaggatcaaacccggccaaactattgcttccttcatgcaacagactgtcatgctatacggaactatggctcggtacatgcgccgcatccgcacctcactttgcccacccgaaattatgatcaactgcgagaccaacccaaaccaaatcggaacatgggtgcgtgagtattggaacttcaacacccagagccatgagaatgactttgaagcgttcgaccaatcccaagacgccaacatgttacaattcgagctcattaaggccaaataccactcaatccccgaggagatcatcgccgggtatcgacacctgaaatgcaacgcccacatcttccttgggactatatcgatcatgaggttgtctggtgaagggccgacctttgacgccaacacagagtgctccattgcatacaaccacacaaggtactttgtgccgaaaggcaccgcccagctctacgccggagacgactctgcatgcgcgtcgcccctctctgaaaaacccagcttccaacatatctcaccagagctcagcctcaagtctaaggccaagattagaacccaacagaaaggagactttgcgaccttctgtggctggctcatcactccaaaaggcctgatcaaaaaccccacccagctttacgcctcctggttattggctaagcacaacaaagatctcgcggacgtggccagaaactatgccttggacttacgcattgcctatcaacttaaagacgagctctatgagttattatcacctgaagaacttgaccaccaccaactgctcgtccgagagatgatcaagcacaaaatgggccatctcctcaacctccctgaggggtttaaaacaaactaa

SEQ ID NO: 524 - DNA, 5343 bp, Potato latent virus
  source 1..5343: mol_type = other DNA
atggctttgacttacagaagtccattggaagatattgttggtgcatttgaaccaagtgttcaaacagctattgcgaacacagctgctaaccactacaagcagcttgaggaagagaagggaatcttatttaattatgcattgccacctgaggccaaacagaggttaataggcgctggcatatatttaagtcccttttccgctgttccacattcgcatcctgtgtgtaaaattttagaaaatcatctgttgtatgtagagcttcctagtagactagataattcttttatgtttgtaggtattaaaaactttaagttggatctgctcaagcgcagacatgcaaatctaagcatgatccaaactatcaatagatatgtttgtagtttagataaaataaggtacggttcaaatttcgtagttagatctagcgctagttatccagagctttgcagacgcaaaggtgagcttgacggagcagtgttgagggaattggtgcctgagttgatgattaaaagcgctaagaatctattcttgcacgatgagcttcattattggacccatcgggatctgattaccttcttggaggtactgaagccagacaaactgttgggcaccttagtttacccacctgaattgctaaagggtgcgaagaaaagtttgaactcttggtgctacacatatagagtggacaaagacaaattgtttttttatccagatggcgtccattctgaaggctacgagcaaccattgagtggcggttacctcctcgaaacaagtaggattaccacacgtgatggtgaagtttattgcgtcgatgttgtgtgcagtaaattcgcgcatcatttgattgcaataacccgtggtgatctgattgtacccacacaacgcagttttgctccctttgaggccataactagtaaaggtttgaataacttggtgaggggcaaggtggaatgtttccccgtatgcgcaagtgtagtgtctaaattgtataggtatttgcgcacactcaaaaaacccgatgagcaatcagcaatggccaaattgagccaacttcaggcaaatcccactggggaagagatacatttcatccagggctttgccaaattggtgataaatacaaacaaaatcgacagtttaatcaactgcgatagtattaaggtgttcatgggcaaattgtttggtccgttgcccaattggcttaccaagagattgaggagcgtgcaagaggtgtctctcgatgaatttgtccattactttgaaccatatgtcgtcaacgtgcccactaagcatgtgaactatggttttgagttcaattacgtaatggaagatttcaggtacgagcagggtgagaatgatctagtggatatgctagacaattttgatggctccacaaagatgagcacaagcctttgcatgatgaccccatacgtcggcttagcaccattgaccacgcgacgcaaattcctatgccatatcgaggagaattccatattcagagtggtgtctaggaacatcttttgtagctacacaaatagttacaaagtggccgtgagcactgagggggtggttcggatacttgagatttatagcaaagtgtctgtggatctactgggagcgtatttgggaaaattgctcaagaaaacagagttcatagagagagtgcgatcaagggttaaggcaattgccataaagcacctcaagtacacttggcaacaggttggtctagcttggttcaccagtggaaggcgtggctacacaaaatacattgattgcagcccatacacgatgaataccttcaaagagcttaaagagagatggggtgtgattgtgcgtgaattgtctaaacagcaggacaacgctgaagctgcgaaaaacatacctgagcaggaaattcaaacgaccagcaaaccaagttgtgtggagaagcgaaattacttctcgaacactttgatgactagctttgctgcgtcaggagtgaaaggcaaggaacaggtgagctccgaaattgccaagggtaggggtgaaaggagcgaattgagggcaactaaattgatgggctcatgcagcaccctcggcaaagtggctcacatagcatcaagaaaaggctccatgggggtattggaatgtgtagcgagggtcatcaaattggatttccaaaccgccttgaagttccttagagtcaagggtgtgtggatgcaggagtatgagagcataggcgagttggaggaggagcagatacagagtcctgcatatgatttttgtgctgcgatcgcaatgaccttcaatgttgaaattgaattgacgttcccaggctcagagcttgtttaccacttcgctgcaagttcaactgtgagttgtatccgcttgagcatttgggaaggcgtagtcacactgatgagggctgaaaatgattgcgttatcactgcatgtgcacaagctttagctagggagcctgaggatgtagtgaaggtgctcaaagatagattggaggagagcatactggaagagatttggaacggcgaaggggtgcctttcgagagaatgtatctcttctttgaagctctggatattcaagcacattgcaatcgcgatggtgcacagctagtgttgaatggcgggggcaagctggcgcgatgtttcgtgattaaagaagatcacatcgagttcgcaggtgagaaaaaggtcagtagagtacttgagctccaggatgctagaacaagtagtaaagcagacccagaattggtcaaggagtttcagaaagccgggactgtggtagaatatgtagcagtgcaatccagagcgcaagtcctggcgaagagtctagtggatgcaaccactggggtgtgcagctcaaccatattcaatgactgtgagagcttggaacgttcctttagattcaccgaaagcgaactagcgcgaaatgtttgttgtgttatcggtacgtttggggctgggaagagtaccctgttcaaggatatgatgaggcagtgcctagggaaaggtgttcactacgcatcacctaggaaggtgttggcgaatgagctcaaagctagtttgggtttggcaaaagggaagcggaatcgaaaagtagggacagagaattggaatgtgcacaccttcgaaagtttcctaaagaaggcgaaaaatgttgcagagggtgagttggtgatcattgatgagatccagttgtacccgcctggctacctggatcttctactttacctcatacctgagttcactagcgtcttcgcggtcggtgatccatgccaaagtgattatgacaacgagaaggataggcatgtcttcttaggggttgagacagatgtctgtaggcttctgagcggccgtgagtacgaatttaatgtactttcccgcagattccacaacttaggctttgaaagcagattgccctgcagattcaaattcccggctggagcagtcaaggaagagtatttgttcgttaattcaatgactgaggctaatgagttggacagcgcctacaaaagtgtgtaccttgtgtcatcccacttggagaagaaaatagtggagtaccagagtgacgttaaaacgccgaatgtgctgacgtttggtgagtcgactggttgcaccttcaagtatggttgcattctcatcacgcaagtgagtagcgcatgtagtgagcgcaggtggatcactgctctatcgagattttctcacaatctctgtttcatcaatgcaactggtgtgcccatagaaaatgtggcgaagagttacaaagacagaagtttgggaaaattcctgtgtggaactgctgttgagggtgatataaaatcaatggcttatgggaccccaatcttcaaagagcagttcatcgccggcgttgggcgcgatgaaggtgtcaaggaggataaagtcaccggtgatccttggttgaaaaccatgttggatttgatgcagctcccagatgttgaggaagcagagatgatgcaggaagagatgcaagaagagtggttcaaaacccatttgccacaagaggaaatagaaggggtcagatgccgctggattcacaaaatgctagctaaagaagcgagggaatgtagaatgggatcgatcgtttcagaccaattcccagatgatcatagcaagcaagaggggaagcaaatcactaatgcagctgagcgttttgaagctatatacccaagacatcgggcaaacgacacagtcacattcattatggctgtgaagaaaaggctgagattttccaggccttctgttgagaaagcgaagctcacgcaggctgaatgttatggaacttacctgctcaaaaacttcttggatgtgatcaagctcaagcccgcacatgatgaggcaatgatgatcagagcgaaggaagattttgagcagaagaaggtgagtaagagtgctgcaaccatagagaatcacagtgggaggtcatgcagagattggtgcatagatatagggcagatcttttcgaaaagtcagatatgcaccaaatgggacaacagaatgcgggtagctaaagcagcacaaacgattgtttgctttcaacatgccgtcttgtgccgctttgctccctacatgaggtacattgaaatgaagctgaaagaagtgctgccggctcggttttacattcatagtggcaaaggtttagatgagctcaactcttgggttaaagaaggtaggtttgagggagtgtgcactgagtccgattatgaggcttttgacgcttcgcaggaccagtacatcgtcgcttttgagttggcactgatgaggtaccttaggcttccaaatgacctgattgaggattacaagtacataaagactcacttgggttccaagctggggaattttgcaatcatgcgcttctctggtgaggccagcacttttctattcaacacaatggcaaacatgctcttcaccttcatgcggtatgagcttcatggcgatgagtacatttgctttgctggtgatgacatgtgttcatcaaagagattgcgaatcaagaaaacacatgaaagctttcttggaaagctgaagttgaaggctaaggtgcaacacactgagaagcccacattttgtggctggaatttatgtgctgatggaatatacaagaagccacagctggtctttgagagaatgtgcattgccaaagagctcaacaacctgcacaactgcatcgataattacgcaatcgaagtggctttcgcttacaaacttggggagctggctgttaacaggatggatgaagaggaattgggggccttttacaattgcgttaggctcataacaaaattcaggcatctgctcaaatccaatgtagtggaggtctttaagcgtaaatag

SEQ ID NO: 525 - DNA, 6318 bp, Apple stem grooving virus
  source 1..6318: mol_type = other DNA
atggctttcacttacagaaaccccctcgaaattgcaatcaacaaacttcctagtaagcagtctgatcaactgctttccttgaccaccgacgagattgaaaagaccttagaagtgaccaaccgcttcttctctttttcaatcacaccagaagatcaagaattgttgactaagcatggtctaacacttgcacctatagggtttaagtcacactcccatccaatatccaaaatgatagaaaatcatctcctgtatatatgtgttccgagtcttttatcctcctttaagtcagttgcctttttttcacttagggaaaataaagtagacagttttcttaagatgcattcagtcttttcccatggaaaaattaaatctttggggatgtacaatgctataattgatgggaaagataaatataggtatggtgatgtagagttttcatcttttagggatagagtgattggtcttagagatcaatgccttacacgtaacaaatttccaaaagttctgtttcttcacgacgagttgcactttctaagtccatttgacatggctttcctatttgagacaatcccagaaattgatagagttgttgcaaccacagtttttccaatagaacttttattcggggacaaggtctctaaggaacccagggtttatacctacaaggtccatggctcttcattttcattttatccggatggtgttgcctctgagtgttacgaacagaatttggcaaattctaaatggcccttcacctgcagcggcatacaatgggctaacaggaaaattagggtaaccaagctacagagtctcttcgcccatcatgttttctcatttgacagggggagggcttgtaatgaatttaatcatttcgacaaacctagctgtctacttgcggaagaaatgcgccttttgaccaaaaggtttgataaagcagttattaacagaagcacagtctcttccctcagtacatacatggcttgtcttaaaactgcaaatgcggcttcagctgttgccaagctgaggcagttggagaagagggatctttacccagatgagttgaacttcgtctattcctttggagagcatttcaaaaattttgggatgagagatgactttgatgtgtcagttctacaatgggtcaaagacaaattttgccaggtcatgcctcacttcatcgccgccagtttctttgaaccaacagaatttcatttaaacatgcgcaaattgttgaatgatctggctactaaaggaatagaggttcccctttctgtgatcatcctggacaaagtcaacttcatagagaccagatttcatgccaggatgttcgacatagcacaggcaatcggggtgaacctagatttactggggaaaagatttgattatgaggctgagagtgaagagtacttttcagagaacggttacatctttatgccctctaaatcaaatccagagagaaattggattctaaattccggttcgctgaaaattgactattcaagattggtaagagccaggagatttagattgagaagagatttcctagatcccatatctaaaggaaaatcccctagaaaacaactcttcttggagtcaacgggaaacattaaatcaaatcccaatgctgaaaaaaatagcgagagcggcgaaataaagattgaaggcagtgccgaaaatgatcagccacatgaggtatcacatacttcaatggaaaccgaggatggacagggttttgaaggttcaataccagttgatttaatcaattgctttgaaccagaagaaatcaagcttccaaagagaagaaggaaaaatgattgcgtcttcaaggccatctctgcacacttggggattgactctcaagatttgttgaattttttggtaaatgaagacatatcagatgaattacttgattgcattgaagaggacaaaggactgtcacatgaaatgattgaagaagttttgatcacaaagggtctttcaatggtttatacttctgacttcaaagaaatggcagttcttaatagaaagtatggagtgaatggcaagatgtactgcacaattaaaggcaatcactgcgagctgagttccaaagagtgcttcatcagattattgaaagaaggtggtgaagcgcagatgtcaaatgaaaatctaaatgctgattccttgttcgaccttggaagatttgtgcataatagagacagggctgtcaagctagcaaaatcaatggcaagaggcacaacaggcctcctgaatgaattcgacctagaattctgcaagaacatggtgaccctttcggagttgtttcctgaaaacttttcttctgttgtcgggctaaggcttgggtttgcgggttctggtaaaacgcataaggtgcttcaatggattaattacactccaagtgtcaaaagaatgtttataagtccaaggagaatgctggcggatgaagttgaacctcaactcaagggaacggcctgtcaggtgcatacatgggagactgcacttaaaaaaatcgacggaacttttatggaagtttttgttgatgaaataggtttgtacccacctggataccttacactgctacagatgtgtgctttcagaaagattgttaagggacaaagtgaaaatttcttgaaaggcaaactgttggaattgtcaaagacttgcttaaacataagatgttttggtgatccattgcaattaaggtattactcagctgaagacaccaatctattggacaaaacacatgatattgacctcatgatcaagacgatcaagcacaaatatcttttccaagggtacaggttcggtcagtggtttcaagaactggtgaacatgcccactagagtggatgagtcgaaattctcaaggaagttctttgcagacatttcaagtgtaaaaactgaagattacggactcatcctagttgccaagagagaagataaaggtgtcttcgctggaagagttcctgtagcaacagtgagtgaatctcagggaatgaccattagcaaaagggtgttgatatgtttggaccaaaatctttttgccgggggagccaatgcagccattgttgcaataacaagatcaaaggtcggctttgactttatccttaaagggaattcattgaaagaggtacagaggatggcacaaaagacaatttggcagttcatcattgaagggaagtctattccgatggagaggatagtgaacatgaatcctggagccagcttttatgagagtcctttggatgttggaaattcatcaattcaagacaaagcttctaatgacctgttcataatgccttttataaatttggctgaggaagaagttgacccagaggaagttgttggggacgtaattcaacctgttgagtggttcaaatgtcatgtgcctgtcttcgacacagatccgacgcttgcggagatttttgataaggttgcagcaaaagaaaaaagggaattccagtctgtgctgggtctttcaaatcaatttcttgacatggaaaagaatggatgcaaaatagacatcttgccctttgcgcgacaaaatgtttttccacatcatcaagcgtctgatgatgttactttctgggcaggtgttcaaaaaagaattagaaagtcgaactggagaagggagaaatcgaagtttgaggaatttgaaagccaagggaaagaacttcttcaagaattcatctcaatgctaccgtttgaattcaaagtgaatatcaaggagattgaagatggagagaagagctttttagaaaaaagaaagctaaaatctgagaaaatgtgggcaaatcattcggagagatcagacattgactggaaacttgaccacgcctttctcttcatgaaatcacaatattgcacgaaggaagggaagatgttcaccgaagctaaagctggccaaactttggcctgtttccaacatatagtcctatttagatttggacccatgttgagagcaattgaaagtgcctttttgagaagctgtggagactcatactacatacactccgggaaaaacttcttctgcctggatagctttgtgacaaagaatgcaagtgtctttgatggattttcaattgagtcagactacacggcctttgactcatctcaggaccacgtcatattggcctttgaaatggcactgttacaatacctgggcgtgtcaaaggagtttcagctagattaccttagactgaaattaactctcggatgccgtctcggatcactagcaataatgaggttcacaggagaattttgcactttcttattcaacacatttgccaatatgctgtttactcaattgaagtacaagatagacccaaggaggcataggattttatttgctggggacgatatgtgttccttgagctctctcaaaagaaggagaggggagagagcgacaagattgatgaagagcttttccctaactgcagtagaagaggtgagaaaattcccaatgttttgtggatggtacttaagtccatatggtatcattaaatctccaaaattgctgtgggccaggatcaagatgatgagtgagagacagcttttgaaggaatgtgttgataattacctatttgaggcgatatttgcctacagattaggtgagaggctttacacaattttgaaagaagaggattttgaataccattatcttgtcataagattttttgttagaaattcaaaattgttaacagggttgagcaaaagcttgatatttgaaattggggagggcatcgggtccaaatggctatcgtcaacgtcaaccgcttcctcaaggaggtcgaatctacagacctcaaaattgatgctatctcgtcctcagagctttacaaggatgcaacctttttcaaaccagacgtgcttaattgcatcaaaaggtttgaatcaaacgtcaaggtttcctctcgatctggtgacggcctcgtcctgtctgatttcaaactgcttgatgacaccgaaattgattcaatcaggaagaaaagcaacaagtacaaatacttacactatggagtcatcctggttgggatcaaagcaatgttgccaaactttagaggcatggaagggagagtcattgtatatgatggagcctgcctggatccgaaaagaggccacatttgctcgtatcttttcaagtttgagtctgactgttgctactttggtctcaggccagagcactgtttgtctaccacagacgcaaatttggccaaaaggtttagatttcgtgtggactttgattgtccacaatatgaacaggacactgagttgtttgctcttgacattggagttgcatacagatgcgtcaactctgcaaggtttttggaaaccaaaactggcgattcaggatgggcttcacaggcaatcagcggctgtgaagcacttaaattcaatgaggaaatcaagatggccatcctggatcgcagatccccgctgtttctggaagaaggtgcaccaaacgtgcacattgaaaagagattgttcagaggtgacaaggttagaaggtcacgctcaatttccgctaaaagggggccaaactcaagggtgcaagaaaagagaggatttaggtccctctcggctagaattgaaagatttggaaaaaatgagtttggaagacgtgcttcagcaagcgaggcgccaccgggtaggagtatatctatggaagactcacatagacccggcaaaggaacttctgacggttcctccccctgaaggatttaaggaaggtgaaagctttgagggcaaagagctttaccttcttctttgcaaccattactgtaaatacttgttcggtaatattgctgtctttgggtcatctgataagacccagtttcccgctgttggatttgatacacctccggttcattataatttgacaacgaccccaaaggaaggggagactgacgaaggaaggaaggccagagcgggttcgtctggcgaaaaaacaaaaatttggaggatcgatttgtcaaatgttgttcctgaattgaaaacctttgctgccacttccaggcagaactctttgaacgaatgtacgttcagaaagctttgcgagccatttgccgatttggctcgagaatttctacatgaaaggtggtctaagggattggccaccaatatttacaagaaatggcccaaagctttcgaaaaaagtccatgggtggcctttgattttgccactggtctgaaaatgaatcgtctaacacctgatgagaaacaggtgattgatagaatgaccaaaagactttttcgtactgaaggacaaaaaggggttttcgaggcaggttcggaaagtaacctggaactggagggttag

SEQ ID NO: 526 - DNA, 5889 bp, Citrus leaf blotch virus
  source 1..5889: mol_type = other DNA
atggctttgatgagcaacaaaactgcaattgaatctattttgggtaactttgaaaagaaacacgtcgatgcaatctacaatgccgccgcacaaactatcctctctcactctgaatttaggaataagcattttgcttattcactcaattcttatcaaaagaagatagcctcaaaggtgggtattgaattgtatccaaatggttatttaccacattcccatccattgtcaaaaatttttgagaaccatttgctttttgatgtacttcctggcgtagtaaatactagtagattagttatgtgtagcataaaggagtccaaagttctggtttttaaagggattcgcgacaaatccagaagacaggtttcagacctcaatgccctcaattccttaaataatagtcatacatcattcattaataggttagttgcatccaaagatgtgagtagatatacggaagaagctgatgctttttttcaatccaagaaagggagtccggagctattttcaaggaatttcatcaaaagcttggaaaataaagaggctgttttttttcatgatgaagttcatcactggactaaggcccaaatgttctcatttcttaaaagcacgaaggtcaaaaggttcattttcactgtagtctatccaccagaaattctcaaaaaatttgccaattcccagaacccaaaggtttatgatttcaaagttgataagggtcggctttttttttttccggatggggttaagacagaggcctatgagcagaaattgaatatggagtggctcttttcagcatcacatcttcgcagtggagactgtgtatggactgtaacaagacataagagtatttatgctcatcacctgtttgagatatccattggcgaactagtcacggactcaaaactttttttttccgattataactccattgacatgtctaaaatatttcttgatcgttttcggagttatgaggtattccccatttcgattgagcacctttataaggtctactcttatctgctttgcctcaaaaaacctgacttggagagtggtctagctaaattaaggcaaattattggagatgatgtcgaaatcaaagaattcctcttctttgaacaattttgtaagcgcttaattgaacgccaaacctcttgggggctatttgggcactctttctttgaaaaattaaccgatatggcattgtcatccttgcccaactctatagcccgaatttttcctcaatggaaaaaaaaaaacacatttgagttccttttctcacttgggactcttgttgtggatgtggagagaaaggtgtgttttgaacatgtgcttgaggaatggggatttgaagttgttatcactgatgaaaatgcctatcttgatccactatctatctttgctatcaatgaaaattttaatgaggatagagtggacgatggttatttggaaagaatccgtcttcccttctggaatctgaatgactatgacttgaaaagaaagagggtaaatgcgtataacattctctcttatcgatttgaagaggagcgaaaaattgaatcagcgcaaaaaggtccaaataagatgctccagattgagtggtacgggattaaagaatttaaagttgacccttttatcagcaactccataactgaatttactcttttagaagcattgctgggaaagaggatagatccaaaaaaatactcatattcaaagcaagcctgcactctttccaactatctcacatttttgtgtgctgagggtttggatggattcaatttggaagagcaccttgaacgaaggttgaaagcggccggtcatgacgtttcagatgacgaggaggaagaattgacttcagctgaacaagcggggcctatcaagatattggctgatccacttggttttatgaaagagtgtttggaggagatcccaatcgaaactgaaccatcactggaagaaagagggcagttttccactgattatcattctgagaaatttgaaatcaattacaatgacatttttaatcctcacaattgcatgaacactcacggcgatgaaattcccacaccgtcagatggcaattgttttttttcagcatttactgaaacttttgaagttgaaagacctgacaccttgaggtctgatttctcagactggcttatggaatttaatggggggtcctatgcttcacttgcagaaatgatcagaccgaatggagtttttatggaggcagaactcatatacttgttttgtgtatttagaggagtcacgttgattattcatgatagaactcatgaaaaagagaatgtttatgctgtacaccgcgggtttgaggagggccatatggtacatagaggcaatcattttgtcgggattgaaacttacaatattagtactttaacctcagaccccttacttggtgacatcccatgcggtttttcagaggaaattacaaaattccattttcggcctgatcatttcaactgtgcccagttcagaggaaggaaggcggcttttatcaccaaagttgatgcagattacgggcacaacggtatggtttacccccacaattcatgggtaccttctttagaagagatcattcagatctgtggtcagggagatgatttcaattgtgcattaataaatttctatgaggcaaactcatctcttgggttccatagggataatgaacgggtgtacaatgatgatcctattttgaccgtctgcacattcggtgaaggtagattcaccattgaatttaaggatcaggtaacttcttttctaatgactgctggctctttctttttaatgcctaaagggttccagaagaaggcaagacactctgtctcaaatgaaatgtcgagagtctcgattactttcaggaagcatgttagaaggttgaatgggtcaccgattgccatcagggaagaaaattacaaaaatacatgcctcattaatgccttttcaaaagcaatgaaaaggagcaaacaggcaatcattgcaaaactgaagactgttaatagccctttctggagtagatacctatctgagggtaacggtggctccattgaagattgtcaatcggcctgtgaggcactggatgttactgtcgaccttaatgtaaatggaaaatgtgtggttcttggaaaaggggctttaagaatctcaatggctttaagaaacaaccatttttcagttatcaatgctgcacaactgatggagaggacttttgttagccacttgcttgaaaaaggaaatgtcaatgtgttagaaggatttgacgcaatgctaagtggtgatgtgggcgcagcaggtgttaacaaaattcaatttgcagccaattttgaatttgctagaattttggcaaattcatttctaaatatgacaactggcatctgcctgggcaaggcattggataatggggaaaagtattttctccacattttgaaagatagagtgaaacagattggtatagacgtcacaatggtgtgcggatttgctggatcggggaaaagtcgcaaactgcagtcctggctgcattcaaggaaaaaagggaacttctgtgtggtttccccaagaacaaacttagccgctgactgggcattcaagttagaattagagcccaatgaacagagaaaggtttcaacatttgaaaaattcatcaaaactgataaaagcaaattagatctcatagttattgatgaattgacattgtttccaaatggttacctggatctcctcgtgtatgaattggctgatgtcaataggcattgtcaaatcatccttctgtttgatccattgcaagcaagataccacaacaaaatggatgaatcaatcctgacatttgaacatgacgtggacaggcttattggtggacagaacattgagtacatttacagcacgcatcggatgtccagatacttcaatagattttttgatgtaccttgcttcaatcaggctgatagaacagaggaacaaaggttgtggatatttgatgacgtttactccataccatccatttgctccgaccgtcaggaaccatgtgatgttcttttggttgaatctgaccttgaaaagaaggcattttcacccatcataaatgttatgacatttggtgaatcccagggactcacatttaatcatgtttgtattttgctgtcagagtccagtgcagcttcaaacgaatttagatggatggtggcgctgacgagagcaaggaccaggttttcactctgttcaaccttcttaggtggaattgaagaatttaaagtcaaaaggaaggaaagtctcatcacatccatactccaaggcgagaagatcacattcaacagattaaatctgatgctgaaatgcaatttaattaggagagaaaaagaaaatgggtgcagagatgaggtcgatagggaggaaaggttggagggtgaccctttcctcaaaccatttatcttcttgggacaaagagttgagaaggatgaagatgaggtagaagaagtgaagatcagggaaccaacctgtcaaactcatctgtatataacagagcctaattttggtttgtgctacaatttcgacttcattagggaaaaagaacagcgggaatacagagaggatatgcttgtaactaaccaattctgtgacagttatgataaggttcatataaacggcaaaagagaaacccctggtcccctgcgattcaaagcgatttatccaaagcactcagccgatgatgacatgacgttctggatggccgtcagaaaaaggcttgtatttagagaagaggaggagaattatcaaaggttgtcaagggcgcatttagttgggggtttgctatacaccaacttcaaaaaaaaaatgggcctggaatttacgtttgaccaaggtctactggaggaaagcataaatgcatttgaaaagaaaaagctggaaaaatcatgtggcacaattaaatctcatagcataaggtcggacattgattgggcgctgaatgatgtatttcttttcatgaaaagccagttatgcaccaagtacgaaaaacaatttgttgatgctaaagcgggtcaaactcttgcctgttttcagcacctgattttggtacagttcgctccatggtgtagatacctagaaacccagatcagaaatcagttgcctgaagaaatttacattcactcaaataaaaattttgatgatttgaatgcatgggtcaaaaaatttttccagagggatatctgtgttgagtctgattatgaagcatttgatgcaagccaggatgaatacatattatccttcgagattcatctgatgaaagatgcgcattttccgcagaaaatcattgatgcatacatagaccttaaatgcaaattgggatgcaaattgggccatttttcaataatgagatttacaggggaattttgcaccttcctattcaacacactggccaatatggcattcactatgtgtagatacgaatggaggagaggacaaccaattgcattcgcaggagatgatatgtgtgcattaaacaatttggctgtttgtcatgatttcgatgacctttttgaactcatcagcctaaaagctaaggtggaaaggacagaaaccccaatgttttgtggatggagactaactccatatgggattgtgaaggagcctgaattagtctataatcgctttcaagtggccattgaagagggaaaggtcttggagtgtctggaaaattatgcaatcgaggtttcttatgcctacagtttaagtgagaggctgtatgaagttttgaaaagtgaaaggcaagttcagtatcatcaagctgtggttagatttatagtcacgcacattgacaaactcaaaacaaaagtgagggaccttttcttagaacaatcttccgacgaagatatctga

SEQ ID NO: 527 - DNA, 2127 bp, Apple latent spherical virus
  source 1..2127: mol_type = other DNA
ggacccgagcaaatgtatataccaactgctcgatctgaatcctttggatcagtctgtcttcttgggaaatggactggccctaagccttattttttagagaatagttctttaactccctctctaattcatgactgtatagatatagacatgacaacggagcctgctattctttctaagaaagatcccagacttcaatacactaacaataaagattttgatccttttctctcaggtatgggaaagtatgctgttgaggctcactcctttgatgaagatgaagaattgtttgaggatgctctagatcgagttttctcagagatacctatgtttacctgtgaagatttatctaatgatcaggtatgcaatggtatagaggacgatgattatgctgaaggattggttatgcagactgctgaaggttaccccttctgcactatgcggcccccaggagtcacaggaaagacgtggctttttgcgggatcaccaggtgattggcacatagtccccaattctcttcttgctaacgaacttaatgtcaaagagttgaaccttagcaagaatatttttgaaccagtgataggtatagattttcccaaggatgagaaagttgattcttctaaagtgtacataaaacaaaaaactcgactttttactatcctacctgttgattataatattttagttaggaaatattttctttcttttgtttcacaacttatggccctccataatgaagttcctacaaaggtaggtattgatccaatttctaatgaatggtctattctttgtcattctcttcactcaaaaggaaccaattggttcaacggagattattccagatttgatggaataacacctcgtaatgtgcttcagggcattgtgaagagaatttcgcgtagatatgctaacaagagttcttttgctataacagatcctacactttctatcaatggtgatcttgctagatcccttttgatggatatgtgtagcactcgatatgggctaactaatggggacctttggtatgtcacttctggtataccttcaggatttcccttaaccgttatagttaattctttagttaattctttctttgtgcactttgcttatatgaagcttcattcttctgaagtgcacaaggctttgtatcctctttattcttttagaacccttgtatcatatgctgtttatggggatgataatctaatttctgtacatgacacaattaaagatacttttaatttagttactatatctaacttattgttggagcatggtgtgactcttaagaatggagccgataaaaatgaggaaattttatctccattctatcctatagagaaggtggattttctcaagagacgattcaccactttacaaggacatattgttgctccacttaacactgttaatataactgagcgcttgcactgggttcgtaagggcctaggtgatgctgatgccacacttgagaactgtaaatcagctctctttgaagctttatttcatggagagctgtattacaatgatcttcgaggcaaaattgaaaaagcttgtaaagtgaagggccttcctttgatagtcccagattaccaagacgctctttctttatttttaactggaggctcatatgctaaggctattcaggctatagcgatgaatctccctgatagaatctctctgtacaaatctgaattctatagtgtacaaatatatcctcaaattttttatgtgaccaatgagagaaatgtcacacttcagaaattgctggagaccactactctccgtaacatttgttatgtttctaggaactacgagtctaggagcagttctaggggtcttttcactcttaagggtgaaggttggactccagctgctttgaaagctcgtcttagtgtgtacaaagctatggccaaacctgtttacttcgtagatgaggctaatgatggtttggctatgttttattgcttagattatgcttttcgtgtttgtggtttaacccggagtcaaattgcaaaaattcttaatgcagtttttggtggtaaccccgaagtctgccaaagaattttccaatttttctctcaagtcgagccaaccaataagtacattcctcccaatcaaaggagg

SEQ ID NO: 528 - DNA, 6588 bp, Soybean latent spherical virus
  source 1..6588: mol_type = other DNA
atgtctttccattgtccaagttctacttgccttggttacactcaatctttctctcgccgtgatatgcgagagcaaggggatcgttgtccccatgctatgtgtggtgctcttctagtgaagaaggtgcccactttatccccacagggtgccagacctgtggtatcaaagaccactgttgtggtccctcctcaagccactgaggaggttttgtattatgggtgtgcccccagacccgcttttcttgaagcggttttggcggccccaaaattaaagatggctccaccagtggtggatgcgatggaagtcgcatacctccgtggtgttgcagccatggaagctgaggagaagaaactcctcaggaaagaaaaggctgcagttgtggcccgtgctaaggcacggcgagctgcaaggaaggcagccaagaagcaagttgccgagatgaaggcaactgtggccctgaaattggccacaaggcaaaaaactgcacgtttgagtgcagctaagagggccatgaaggccaaaagaaaggcagccaaggaggctgccaggttggcgcttgaagagcgccgtgctgcgggtttaacccgcaaatcggccttcaggcgtagcctgaaaaagaaagccactaagatggctggtaggaaggtccctaagacctccacttccacctttcccaaggtggaatctttttcttgttttccttcttctcccctccctgcttttattagggaggaacagccctgggtggctgtgaataccccctgccctcatcctgagggcttcgatttggcggttgatcccgcctttgtggctcctattgtggggccaatcgttagtgtgccatttatggcacctgttgtgaaggcttttaatagccttgtagaaattttggcggctatcaattatgaggccgctgtagatttaagagcctacattttagaaatagcttcttacgaaaatttctttgctttacggagaatttttgttggaaaagctttatcttggatggctcttatcctacctctttatccctatgcgggcatctttgatacttatctcccacttgatatggtggaagataagaattgtgatgcttatttagcctcattacagcagactgcagtgatggtgctggaagtgacccagggaccaatggacgcacattctatctttgatatagtgcgttccgttggttctaaggttgctagcataaaggacaaggtagtgggatgtatagttgagaaatctgctgccctgttggacactgttatagacacagcaaagggcatgttttttggagttcttggcccataccttgcccgcgcacagaagatcggagaggaaattaaaaaattctgggataactgtgtcgagtgggcaacaaaattgtggcaaggagctcatatagcattacaagctcttggcatttatgctgtttgggctatagttgctatggtgcttgtaggagtaatgtatatattagaaacaattttgatttgtttaggtgtaatgagtggtcatggtgtccttgttgttgctttgacaggggcagtcatgacttttttaggttttactgtttttcagatggggcgtgagtatatacattttttgaccgccctacgtcaaatcattttcttagcagttattccccaaggaggattgactcaagttaatatcatggattcgtccgttgatgttactgagccacactccttgttagatactgctatggcaccagttcattttttggaaactgttgccagtggtttaacattcttttcttctacctctgttacagtcttaggtaaattaggaaattctctggagggaattcgcaaaggttttaattgcctacgcgattttacttccgttttgttagaacaatttggaaatgcttttgaatacatttccggtaagagaacgtctttcttccgtgatcttgcgtgtgcagttaaagtagatatcgctcgatggacccaggatgcacgggaaaccattgagtattttgaaatttcaggttcccttgataggtatgagtattatcgtgctcgtgagcttatctatcaaggtcaagatttgatcgacaccgccaacaaagctcgtagttcgcacacaagtgtaaaattcttgcgaactattggcaagttggttgaggaactaaaagaaattcgtgctaagtgtgcacgaagtttaaaattcccaggatggcgtcgacagcctttttgggtatattgttttggtgagagtcaatgtggcaaatctactttggcaaattatttgatgccattgttgatgtctcacatgggttgggatcctcaggatgtttacagcaaggatcccgttgatggttactggtccggatattatcagcagaagggtttaaagataaatgatttatctgctgttaattccaaagatgtagcgcccctcgagcagcagttgataccattgatatccactgaggagaaaatggtgtcttcggctgaaattgaaggaaaaggaatgcagtttgcctctgaaattgtagtttcttcatccaattttaatgatgcaccaactggtgctgaaattttggatgcagatgcttacagacagagacgaaaggttttgatgcgctgcagaagggctgctgagtgggttcataatgctgatggtacgcgcacagagaagcttgatgctgagggcaaaattgtatataagccctatgatccatccaatgctttatcttgtaccgaggtgcaatggattcatcctgtttcatttacagctcttcccggaccctgtgggcagtggcacttagccgagttcaccatacctatggtgaaggaggctatggatgcccactttttgcaagaagaaacaaagatggcatcctggaagtcgagccttggcatgaagagtcaaacagcaaggaaaatgggttcatacttgcaggatatgattaagggtattggtaattttgttacccttaaaggagcaaaagattcagatcctcgttatttgctggtagctgttgatggaaaatgctatgcgttagaccagcaagggaaagccactccttatgaggattgtgatgttgttgaagaaattgagcggctaactttgttgcaataccgctcttatttcgcggacttggtaatggaacatgctgacaatacatattatcaagattcattccattcatcaacagtccgagattttttgttggctctaatgaaagatgggtcaactgttttgtctgtggatagtctgggtagtagtactcaggacattcacaaagaattatgggcagaattgggactttcagaaaagatttttctgagggtttcacaaatagctcgtaatcaattgcgcgatgctccacattttaaggaagacgttgcgcacaattttttggaaactatgaggcatcttagggatgctattgtagatagaaaggaacaaattcttttattttttgcagcagtagctttagtgggcttgtttagttggggttttttgagcctaattaaacaatttgcttgtggttctttaggatttggtgctggcatcgcattgcgtgagcaaattgctcatagtagtgttatgtcttcaggtagtgtgactagtgcctttgttgcacgcaacatgccagttgtatggggcaaagctgctaggtatgccactgcacactcaagcaaagaagaagtgggcgccaattttgattattttgaagatgctagtgctcatttgttagctcgtgttgttggctcatctggtcagtctgagacctgccttttatttggtcatcaggctattgcactttgtgcgcaccagttgagattgtttcctgacaatgacagggtgactatccattatttttcaaaggagaggcgccctgtttgtttttcatttacttggcattatattaatgctattgagtggcctgactgtgaagtaattgtatatagagatgcacagctcacgccactccctgtatatagtgatgataattatttgtgtggggagcaaacattgcccacagttttaacgataactgggctctcaattaagaagaagaaattctttgatgattccacgttgtgcccaagcgaaaaaattctggacggtgaaatgcccatcgtccggagctggaaagataccgcttctctgagaacgcaagtccagacaattttgtccgagactcatagaagagatataaataggtattatacttctagttacccatcagggaaacatgatagtggaggtataataactgcagttataaatgggaagcgtaaagtgataggcatgcactgtgcgggggcgcaaaatgggaaaatttatgttagtaccattggtcttttgcccacccgcaacattaatgatgcacactctgctgccgattattttgttccaagtattggcagggaggaaaaaggattttgcaagattggttggattgcagatccttcaaagagaccacatgctgccactaagactgcattggcaccagttcctaaggaattggctttgccattgccagagggagtgtctgtaaagattccttctattttaagtgcagcagatccacgcctgcgtgatgaggtgaatcctgaatttaaggattatgatcctctacgcgtaggtatggataaatttgccaaccccatggatccgcttgatgatgaagttttacagcgggtctgtgaagatatttatgaaacctggtatgactgtttaccaatactagatgatgagaaggtcttcttgcaaaagacctccttggaggtggcgttgaacggtataccgggtgaggcttgctatgaagccatgaggttggatacatctgagggttatccttttgttttagaaaggaaaccaggggagagcggcaaactcagttatgtacatattgatgagaatggcgttcgttcccttattcctggtacatcggtttttagagattaccatgaattgtcagcaagtatactgacccaagtgcctgtgttgaattgcattgaatgtcctaaagatgagttgctaaaaccatctaaagttttggagaaaccaggcacacggcttttcgatgtactcccctttacacataatattcttttgagggagtattttttaaatttttgtgtttttctccaacaaaatagggtgcatttgccctgttctgttggtgttaatccatattctcgcgagtggacctggctttttgataggttggctgcgaagagtgataaagctttgaattgtgattatagtaaatttgatgggcttatatcacatcaagtctacatgcacatggttgcaaccattaaccgactctttagagatggtgaggaagcaaattgtgcgcgtaagaacttgtttttaatgtttacatcacgcaggagcatctgctatgatcaggtttatatggtcaaaggtggaatgccttctggatgcgcactcactgtaattattaattcaattttgaatgaaattttagtgcgctatgtctatagaataaccgtcccaatgccagccaaaaactattttaataaatacgttgaattggtggtatatggtgatgataatttaattgccatacatgatgatgtggtctctttttttgatgggcccattattaaggaaaaattggcagaggttggggtgaccattacggatggtactgataaatcatcacccaccttgttacgcaaaccgctggagtctcttgattttttgaagaggggctttaggaaaattgaagggggaatgtattcttgccctctggataaagggtccctttactcccggttatattacagtgctggaggtaaagggggcctttttcaacttgatatcctccacgataatgttaaatctttcttggaggaactgacgcatcatgctgatcattatgaagagtttcaaagagtgcgcagtttttatattaagcgtattccttcatggtcagctacgctgcctacctatgctacatgtctgaatatgatggaggggcagcggaattcagcaacaccctggcaaccacataaatttatagaaacgcggccttcaggttgcgaaactaaaatgatggcgggccaggataatcatgctcagaagatatgtgtaactgagcgtataattatatgtggtgaaaaatatacgccaccaatactggagacctcttttgttgtttcaatagacaaccccctttatattggtgaaaggggggagtatgttaaaacagagtttggttcaggtatggggcgactgcctactgatgcctggatcaaagctttctccagtcccaagaagcacccacagctttttgaagcttataagatgggtgctactatatattttagatcctgcatgccctatttaaatgcatggtgtgcagtgtgtaagtttgcattggctcatggaatcgatcagagttctattattgctatgtatgagtcatgcaaaccaagaggggcgggcgacattgctcctcttgtggccgtaaaggcatacactaaatttgtgaacagaccagtgtttaaatttaaagagactgttcataaggaagtgctcgaagcacacaatagtgtgcgagtcgcctaa

SEQ ID NO: 529 - DNA, 4652 bp, Poinsettia latent virus
  source 1..4652: mol_type = other DNA
acaaaagaaagatatatatatctttactccccaaatctctcttactagaaatcgtttggatctgtaagcgaggttatgcaaaacgtgaacattccagttggaatttgtaacaaccgcattgtctttcgatctctcggatttgccttaagcgaaaacaacttgactatcgaagtcttgtctagaccaatcgaaagcttgggtcgagtattactctttctttatctctatccatcttttgcagcagattacgctcagagatattatggcgctacttggaatcaagcttatgacattagtgttcgcagcttggctttcttgttgccattcctcttcagccctgccgtcgagtgggctgtcgggcccgtgtttaaatcattcgtgcctcttacggaactccttaaatggagcctcgcagtggggtactatcctacattccccggcagtaggcagcaattgccctccgtgccctatgatgtcaattatggggtgcagtccaccaaagccgctacagtcaaactcttacggcgtgctatgctcgacgattgcatccaaagcaaaacaagacttgaagctatgctggaaagaggtccagacacgttcagaaatgtactcaaagcgcatatcagccgcattgatcgattcacttcatcaagcggttggcatgttgctgatgattatcatatggatttggtcctcgatatttctagtggtatatcacgtcctagcgtacatgacaacatatcatttatccagcgcagtatgcgtaggatttctgatattctgtacgatttgtgcgttccggctcatttcttggatttgtggcgatttactggccttcaatgtttctggattgaccccaatttgggtaaattttagtgaatccagttgtccagcaggcctttcattgaggagatacaagaatgagaaaactgtggaggggtataaacctttcattataccccagaaatccccaaagaagtcagtcattgaactttctttttccaatggtagtcacttgggctatgcaacctgtgtccgtttatgggatggatctatctgtctcatgaccgctaaacattgccttgtaaaagaggctttgttgaaaggacgcgtggccggtcattctcttcctgtgaagaattttgacctctttttgacctgtgatgaaattgatttttctttactccgtgggccgaaacagtgggaagcctacttgggagttaaaggtgcggatttgattacatctaaccgcattggacgctctcccgtaactttctataatttgtctaaagacggagaatggttggctaattctgcccagataaccgggaggcacgggaaactgtgctctgttttgtcaaacacttcccccggggactctggaactccgtattattcggggaagaatgtagtggggatccacaaggggacttctgaattggaaaattataatttaatgattccgattccgaatatccctggactcacctccccagattttaaatttgaaaccaccaatgttagaggtaatctctacaatgatgagggtttccgactcagcgtaggggaagatgataaagcagaacattggactgatcgtctgatgaaaagtatcaccttcaagactaaaagatgggctgattgggcggaagaggagtctgaatctgatgatgaaaggggcaaggtagtaccccctgccaagccgtcaaactatggagaagggtgtccacctgaacataatcaatacttgagtgatgtaggcgatctgctcacgaaagttattggcccagaacaaaatgagaaatgtgtagacatactcatgggtattatgggcgtggataaaaatgaggtggccccccacaaggaagaaaaggcagaaaagggaaacgaagcagtggtttcggccacggtaaaaaccgtaaaggaaccaaccacccaatgcgacgaggatataatttccgaaattgtaaaaagggtggtggacaagatgaatctgaaagccatagagaaatcagtggtagagatcctggccgagaaagcaatgacaaaagcccccagggggaagcggaagaattcgaaagatacttctcgtccttctactcctggaagttacataattccggcgaagcgaactccggattcaggccctgtggaaaaatccctaaattctaccggccgcgcaaaagaagagtctccgagtggggccagaaccttgccaggaaacattccagcctgggtgagataacccaaggtttcgggtggcccgaagcaggggcagaggccgaactaaggtctcttcgattgcaggcacagcggtggcttgaacgttccaagtcatccgttattcctagtgccatagagcgtgagatcgttatttctagactagtggagagctataaaatttgtcgatctgaagcgccactatgttcttctggcagtgacttgagttggaaaggttttcttgaagactttagagaagctgtcagttccttggagctggatgccgggataggcgtaccctatattggatatggatatccgactcatcgtggttgggttgaaaatcctaggttattaccggtcctttcacgcctagtgtatgctcgtttacagaggttagctacattaagcgttgatggcaaaacccccgaggagcttgtaagagatggccttgtcgaccccgtaagggtgtttgtcaaaggtgaaccacacaagcagagcaagcttgatgagggtcgttaccgcctcattatgtctgtctctttgattgatcaactggtagcccgggttttatttcaaaaacagaataaattggagttgcttttgtggcgctccataccatcgaagcccggttttggcttatcaactgtagagcaagtggaagagtttattgaccatcttgcgagggtagtggatgtgaaaagtgatgatctcctggaaaattggagagagcttatggtccccactgactgttctggtttcgactggtcagtctccgattggatgttgaaagacgagatggaagtacgtaatcgtttaactattaattgcaatgatttaacgagacgattgcggaattcatggctttattgcctgtccaactcagatctagctttatctgacggatccctcctggctcaagaagttccaggggtgcagaagtccggcagttacaacactagttcaactaatagtagaattcgtgtgatggctgcctattttgctggagcatcttgggcggttgctataggagatgatgccttagaatcaatcgacacgaccctagccgtgtataaaagtctaggctttaaagtcgaggtttctgaagatctggagttttgtagtcatatttttaaaactcggagcctcgccattccggttaatacatcgaaaatgctctaccgtttgatttacgggtatgagccggagtgtggaaatcttgacgtgttgcgcaattatctttgtgctttagcatctgtgcttcatgaattgcggcacgatcaagatttggttcaaaatttgtctaagtggcttattccagatgggtcacaaaagataagttagtatggctaagaagggagtgaacaaacaagccaggacaaatagtaagttagatcaactcgtcacctcactggagcgactaaccgtggggtccatgcagagaaagagtaaccggcaacggccaaaatctcgtaagacgtcgggacgagttgtgacagctcctgtttcgtcagctgcgcttatccgttataaagcaccttctttgaacggtaattctatggacagtgttcgtttagccagcaagtcactggttatcgaagctgtaaaggtgggtatagaatatcaggtttcagtggttcctttagtaccttgtattcaacatacctggctctcgggggtcgcttgttactggtctaagtaccggtggcgttcgtgccgtctggtatatatcccatactgttcatcgtcctttactggttacgtatccatgggtttgtcttatgactatgcggacgctattcccagtgatgaaactgagatgagcgctctcaaaggatataccactacttcagcctgggctggtagtgagggcattaaaatgttgagttatcccactggtgctgttccgagcggggcggtcgttctgtctttggattgtgctagcatgtctaagccttggtatccttatatctcggctgttgctgcgaccaacctcggtgagaaacaacctgagttgttgaaccagtatactcctgctcgtgcctttatcggtactggtggtggtatgcaaggggttaatgggcttacagcagggcgagtttttatggtctatgacattgagctgatagaacccgtttcaccagccatgcaagagaacctttcttcgactggtagaagtaaaattgaccagagtatctcaccacttacgggagcggacttcgagattgtccgtaaggtttccgccatttctcagatccagtaatggatagagtgtgatccccagtttaagaggtgctggggtgagtttagtgtacacgtaagcacctccacgaaagaatgcgttcaagtaggcaccaagtaacttagctgtattggtaacaacataaccgttgtgcgtgacgggaaatccaataccgctaggtttctagtgt

SEQ ID NO: 530 - DNA, 6090 bp, Siratro latent polerovirus
  source 1..6090: mol_type = other DNA
acaaaagaatacggaggggaacttcgtgcaagcatttgttgaggaatattttctccaaatcttgcctttaagcttgagcatttgttgagatattttctccaaatctcgcttttctttacggctatcctggatttccagagaacagcaagcggcgacgttgagtgcacgatcaagtttgatcttacttaccgcccttacccagagcgtgaaatttacttttacacagtcctttggggttattgcacttacttcttacaagccgtcttcacctccgccgaccatgaactcttcggtcgttgctttgtttttcttttgtcttttctgctgcgcggcccccgcaacatatgccggggtcaattccttcaattccgggggatttatacccggaaattttactgcgcagcactctgccacagattgggggttcatatccccctttctgactccctcaagcgccaaattaaatttcgtatcaatcgaatgcgctttaccgagggaatgtccagagccaccagcgcctacctacaaagggctcattcagagtctgtgggcgctcgtcttgagcgacgcaaagacgtcctcattggcggtaagcttgaaactgagaaatttttatctgcttactgccgccaccttgagcaaggggttccggaccctcgtccacaatttttgttggttgatggtttatgtctggttctccatactttggcggaccattgctacaatatggcatttggtgatcagcaacttcggtctcgtagtttgcgccgccttgctttatgccttgactctactcttggcaaaggtggcctcatggctttttgggcaaatgcccatttacctcgctcttacattgatcaaatttccgaggtacatctggcagagacgaccctggggaaagagctcaagggtctatgaggaggaaaagtgctgtgagcagtacctgtcattcaaaatcaaacaggaccctccaaagaaatgtcaagtcgtattccaaaacgacgagggtaaacactgcggctatggtacgtgtatcagattatttaatggtaccaatggcctaatcacagcttatcacgtggcttccaccgccacaaaggttgtttccacaagaacagggacgaaaattcccctgtctcaatttgaacctttgatggtgtcccaacaatatgaccaggcgctctacgccggtccaaaagaatgggagtcactcttgggttgcaaaggagtaaactttgtccccgccaagaccctcggcgcttgcaatgcgtcgatatacttcattgaaaaagatgggtcttggggctgctccaatgcaaagattgaaggccagttgaagttccacgatgtgtcccgcgatggcggcaagactttccgtgatgcacttcctggtcaactttccgttttgagcaacactgagcccggctattctggtgccggctatttcaacggaaagactctcgtggctgtacacgtagggggctcacttgagtgtgaggactcggattctacttacaatgtggctgtcccggtcctgcccaaagctgggttaaccgctcctttatacgtgtttgagacaactgcgcccacctcaggtgttttcgacacaaagactgttgaacacctcactgaaatcttcgatagggagatgaggtggatgaattccaagcgcgagaaaggggaagtgttatgggcagacatggaggatgatctaccatatcaggctgaaagtgacaagaaaccatcagcccttcccaaaacctctcccggcgcctccacaagctccgagtcgggaaacgagaagagcggctccgaccgcttaccaaccggaaaagtccccgctgtcccaagaagcgaggcctccgccacccaagtaaaagatataccatcaggagaacaactgatgaagatgttggtggagaggattgccgccaatataaacctgaaagaggtcgagaaggcctcagtggcggcaatttccgagcaggccctgaagaagccgagccgttcgtccagacgacgacggaactcgaagagcggaggcgccaatggcgctcaaaagcagacaactactcccgctacttccactcccactaccaatgggaagtatcaggcgccccacaagaggtcgccggcttcaggcactgcggcaaagccccccaatggtaccacccaaagcagaaacaagaatgtgggtggggggaagaggtcatccggaaacatcccgcactgggtcagaaaaccagcgggttcgggtggccccaattcggtagccaggccgaattgaaatccttgcggctacaagccgcgaggtggctggaccgcgcccagtcggcagaagtgccgtcccctgctgagagggagcgcgtgataagacgactggtggttgactatcggcaagctcaatccgtcaaccccgtcgctacaatgagtggggaactgctgtgggatgattttctacaatcttttaaagaagcagtttcctctttgcaacttgacgctggagtaggagttccctacgtggctctgggtaaaccaacccatcgtagcctagtggaggaccctgaaatgctccccgtgttggctcgcctcacctttgaccgtttagagaagttgtcgaaggttgatgctggaagactcacggctgaagagctagtgcaacaggggttgtgtgaccccatccgcgtctttgtgaagggtgagccccacaaaaagagcaaactcgatgagggacgctaccgcctcatcatgagcgtatcactggtcgatcaattggtggcccgggttttgtttcaggagcaaaacaagaaggaaatacaacaatggagggtcgtgccctctaaacccggtttcggattgtccacggacggacaagtgtcagagttcacagaagctctggcccacaaggtgggggtaacgccccaggaattaattgctaattggcgtgatcaccttgtgcccactgattgctccggttttgactggagcgttgcggactggatgcttgatgatgatatagaagtccgtaaccgcctcaccagaggtctgacccccatcacggctgcaatgcgtcgtgcttggaaacattgcatagcgaattctgtgctgtgcttgtctgacgggactctgctggcccaatgtgtgcccggagtacaaaagagtggtagctacaatactagctcctctaactcccgaatcagggtcatgtgcgcctaccacgccggcgctacctggtgttgtgccatgggcgatgacgccctggaatcagtggactctaacctagcggagtataaaaggctaggtttaaaagtcgaggtgagtggaaaactggaattctgttctcatatctttgagtcaccctccctcgccacccctgtgaatgtaggcaaaatgctctacaaacttatattcggctacaatccagggtgtgcaaatctcgaggtcatcgccaactacttggctgcctgcttttctgtgtttaatgagttaaggcatgaccccgagttggtcctccaactgtatgagtggctggttcttccagtccaggcacaaaagatataagagaggaccactcagctagcccggaatttgttgttgcaatcgcgggaaaagaaagtcaactacataaggcaagattgatctcaaatttttagccggtgtttcaataggattcatcatctccataccggtgtcaattcttgctatttatttcatctaccttaaaatctcggcccacgtacgctcaattgttaatgaatacggccgtggttagaaccaatggcatgggaagacgcagacggcgtaacaggcgcaatgcaaggcgccagcgcgtggttgtggtccaaacccctgggctcccacgacgcggacgaagacaacgacgaaaccgccgacgcgttaatagaggaagcagaactggagggggacgctcgagcgaaacatttgtactttcaaaagacaatctcgcgggcagttcctccggaagtatcaccttcgggccgtctctggcagagaagccagagttcagttctggaatactcaaggcctaccatgaatataagatcacaatggtcaagctggagttcatctccgaggcctcctcaacttcctcaggttccatcgcttatgagctggacccccattgcaaatacagcacccttcaatccccgattaataaatttggaatcaccaagaacgggtcgagaagttgggctgctaggttcatcaacggggtggaatggcacgacgcatccgaagatcaatgccgaatcctctacaagggaaacggcgcttcgtcgattgcgggctccttcaggatcacctttaggtgccaattccaaaaccccaaataggtagatgacaattccccccccccccctccctctccagcaccccaacctggtccgagtccgcccccaccggagccgacgccctgcaaaggagcgcgcttctgggggtatgaaggagtaccacaaaataagatcataaccgctgagaacgatcgaaacatcgacgtccgcgggttaaattatgtccaatttgataagtgggaagatgactcgtggcaaacggtaaatctgcaggcaaattactcggtgaacaattcccagtatgcagaaccgtatatgatcgtgcccgccaacaaaggcaagtttcacatttacattgaagctagcgggcagatgactgttaagtcggttggtggtaaagctgataacacctgtcgaggtctaatagcatatgacacctccaggcgtagctggaatgttgggaactacaaaggttgtgtattcgaaaattacaaaagtaaaacctcctttgtactggggcaccccgactatgtcgtgaacggatgcaaatttgattcggcacgcggggtagaagctgattggatagcctcgtttcaacttacatgtgatgacgatgaaggcgcgtggttgctgtacgcgccccccatacccaaggacagtctgtataactacactgtgtcctatggtgagtacactgagaatatgtgtgaatggggtaccgtctcaatttccattgacgaggacaatcagaaggggaatgaagtcaaatgtaaaccatcgaagggggaaatgcgatggtctgagccagaaagacaactggttaaacaaactccgacggaatataacgtcgtcccgatatctggttcgggagatgcacccttacggaccattccgtataggagagtggacaggcctgctttacaagccgcagctgaagaagctgttgatgatttagatctgcctgttcgccctacaatcgacaaggatgggagagttgtgcgaggggattactcttttgagattcctgacgccctcccacctgcgctatacaagcaatacattcgtgatctcacgatggcgcaggagctccaaaatgaatttgatgaagaatcaatgagagctaaatccttgatcgaagcacgaacttgtggagattcacgagtccagtatcgcagccgtgagaacgagattgctgagacggactctatcttcgctagaagaatcgctagccagcaaactgaaaagtttgatgatcgccatgagatcgttcctaattgggatgattatcagtttagtacggccactaatcaagaacctcacccagatgaggatgtggaccggaagtcaacgagatcgagcctgacaggctctctcaagggcgtcttaaagaaaagattggctaaagacgattctcaatctaccagttcgatgcttaagggtgctttaagaccgaaggtgtctttcgacacccggctctcgcagctatcaactgtgcagcggttcacatatgaacaaatgaagaaaaggaaccctgcagctgctgagaaatatctggatcgagaaatcggtccttcaacctgatggaaaacaggagaaacaaacccacgttggcatagtgtcccagcgttgtatcaccgacagttttagcaccttgaaactgttgagcactattccaagaggtgaacgaaagttcttcgtgagctagtaggcatgaatgggttttattggggggacgtggaaatccgggttggaaaccgggctccctccagtaactccgtgc

SEQ ID NO: 531 - DNA, 75 bp, Poinsettia latent virus
  source 1..75: mol_type = other DNA
acaaaagaaagatatatatatctttactccccaaatctctcttactagaaatcgtttggatctgtaagcgaggtt

SEQ ID NO: 532 - DNA, 280 bp, Siratro latent polerovirus
  source 1..280: mol_type = other DNA
acaaaagaatacggaggggaacttcgtgcaagcatttgttgaggaatattttctccaaatcttgcctttaagcttgagcatttgttgagatattttctccaaatctcgcttttctttacggctatcctggatttccagagaacagcaagcggcgacgttgagtgcacgatcaagtttgatcttacttaccgcccttacccagagcgtgaaatttacttttacacagtcctttggggttattgcacttacttcttacaagccgtcttcacctccgccgacc

SEQ ID NO: 533 - DNA, 169 bp, Poinsettia latent virus
  source 1..169: mol_type = other DNA
tggatagagtgtgatccccagtttaagaggtgctggggtgagtttagtgtacacgtaagcacctccacgaaagaatgcgttcaagtaggcaccaagtaacttagctgtattggtaacaacataaccgttgtgcgtgacgggaaatccaataccgctaggtttctagtgt

SEQ ID NO: 534 - DNA, 199 bp, Siratro latent polerovirus
  source 1..199: mol_type = other DNA
tggaaaacaggagaaacaaacccacgttggcatagtgtcccagcgttgtatcaccgacagttttagcaccttgaaactgttgagcactattccaagaggtgaacgaaagttcttcgtgagctagtaggcatgaatgggttttattggggggacgtggaaatccgggttggaaaccgggctccctccagtaactccgtgc

SEQ ID NO: 535 - protein, 541 aa, Poinsettia latent virus
MRRGYNFRNCKKGGGQDESESHREISGRDPGRESNDKSPQGEAEEFERYFSSFYSWKLHNSGEANSGFRPCGKIPKFYRPRKRRVSEWGQNLARKHSSLGEITQGFGWPEAGAEAELRSLRLQAQRWLERSKSSVIPSAIEREIVISRLVESYKICRSEAPLCSSGSDLSWKGFLEDFREAVSSLELDAGIGVPYIGYGYPTHRGWVENPRLLPVLSRLVYARLQRLATLSVDGKTPEELVRDGLVDPVRVFVKGEPHKQSKLDEGRYRLIMSVSLIDQLVARVLFQKQNKLELLLWRSIPSKPGFGLSTVEQVEEFIDHLARVVDVKSDDLLENWRELMVPTDCSGFDWSVSDWMLKDEMEVRNRLTINCNDLTRRLRNSWLYCLSNSDLALSDGSLLAQEVPGVQKSGSYNTSSTNSRIRVMAAYFAGASWAVAIGDDALESIDTTLAVYKSLGFKVEVSEDLEFCSHIFKTRSLAIPVNTSKMLYRLIYGYEPECGNLDVLRNYLCALASVLHELRHDQDLVQNLSKWLIPDGSQKIS

SEQ ID NO: 536 - protein, 1093 aa, Siratro latent polerovirus
MNSSVVALFFFCLFCCAAPATYAGVNSFNSGGFIPGNFTAQHSATDWGFISPFLTPSSAKLNFVSIECALPRECPEPPAPTYKGLIQSLWALVLSDAKTSSLAVSLKLRNFYLLTAATLSKGFRTLVHNFCWLMVYVWFSILWRTIATIWHLVISNFGLVVCAALLYALTLLLAKVASWLFGQMPIYLALTLIKFPRYIWQRRPWGKSSRVYEEEKCCEQYLSFKIKQDPPKKCQVVFQNDEGKHCGYGTCIRLFNGTNGLITAYHVASTATKVVSTRTGTKIPLSQFEPLMVSQQYDQALYAGPKEWESLLGCKGVNFVPAKTLGACNASIYFIEKDGSWGCSNAKIEGQLKFHDVSRDGGKTFRDALPGQLSVLSNTEPGYSGAGYFNGKTLVAVHVGGSLECEDSDSTYNVAVPVLPKAGLTAPLYVFETTAPTSGVFDTKTVEHLTEIFDREMRWMNSKREKGEVLWADMEDDLPYQAESDQETISPSQNLSRRLHKLRVGKREERLRPLTNRKSPRCPKKRGLRHPSKRYTIRRTTDEDVGGEDCRQYKPERGREGLSGGNFRAGPEEAEPFVQTTTELEERRRQWRSKADNYSRYFHSHYQWEVSGAPQEVAGFRHCGKAPQWYHPKQKQECGWGEEVIRKHPALGQKTSGFGWPQFGSQAELKSLRLQAARWLDRAQSAEVPSPAERERVIRRLVVDYRQAQSVNPVATMSGELLWDDFLQSFKEAVSSLQLDAGVGVPYVALGKPTHRSLVEDPEMLPVLARLTFDRLEKLSKVDAGRLTAEELVQQGLCDPIRVFVKGEPHKKSKLDEGRYRLIMSVSLVDQLVARVLFQEQNKKEIQQWRVVPSKPGFGLSTDGQVSEFTEALAHKVGVTPQELIANWRDHLVPTDCSGFDWSVADWMLDDDIEVRNRLTRGLTPITAAMRRAWKHCIANSVLCLSDGTLLAQCVPGVQKSGSYNTSSSNSRIRVMCAYHAGATWCCAMGDDALESVDSNLAEYKRLGLKVEVSGKLEFCSHIFESPSLATPVNVGKMLYKLIFGYNPGCANLEVIANYLAACFSVFNELRHDPELVLQLYEWLVLPVQAQKI

SEQ ID NO: 537 - DNA, 1626 bp, Poinsettia latent virus
  source 1..1626: mol_type = other DNA
atgcgacgaggatataatttccgaaattgtaaaaagggtggtggacaagatgaatctgaaagccatagagaaatcagtggtagagatcctggccgagaaagcaatgacaaaagcccccagggggaagcggaagaattcgaaagatacttctcgtccttctactcctggaagttacataattccggcgaagcgaactccggattcaggccctgtggaaaaatccctaaattctaccggccgcgcaaaagaagagtctccgagtggggccagaaccttgccaggaaacattccagcctgggtgagataacccaaggtttcgggtggcccgaagcaggggcagaggccgaactaaggtctcttcgattgcaggcacagcggtggcttgaacgttccaagtcatccgttattcctagtgccatagagcgtgagatcgttatttctagactagtggagagctataaaatttgtcgatctgaagcgccactatgttcttctggcagtgacttgagttggaaaggttttcttgaagactttagagaagctgtcagttccttggagctggatgccgggataggcgtaccctatattggatatggatatccgactcatcgtggttgggttgaaaatcctaggttattaccggtcctttcacgcctagtgtatgctcgtttacagaggttagctacattaagcgttgatggcaaaacccccgaggagcttgtaagagatggccttgtcgaccccgtaagggtgtttgtcaaaggtgaaccacacaagcagagcaagcttgatgagggtcgttaccgcctcattatgtctgtctctttgattgatcaactggtagcccgggttttatttcaaaaacagaataaattggagttgcttttgtggcgctccataccatcgaagcccggttttggcttatcaactgtagagcaagtggaagagtttattgaccatcttgcgagggtagtggatgtgaaaagtgatgatctcctggaaaattggagagagcttatggtccccactgactgttctggtttcgactggtcagtctccgattggatgttgaaagacgagatggaagtacgtaatcgtttaactattaattgcaatgatttaacgagacgattgcggaattcatggctttattgcctgtccaactcagatctagctttatctgacggatccctcctggctcaagaagttccaggggtgcagaagtccggcagttacaacactagttcaactaatagtagaattcgtgtgatggctgcctattttgctggagcatcttgggcggttgctataggagatgatgccttagaatcaatcgacacgaccctagccgtgtataaaagtctaggctttaaagtcgaggtttctgaagatctggagttttgtagtcatatttttaaaactcggagcctcgccattccggttaatacatcgaaaatgctctaccgtttgatttacgggtatgagccggagtgtggaaatcttgacgtgttgcgcaattatctttgtgctttagcatctgtgcttcatgaattgcggcacgatcaagatttggttcaaaatttgtctaagtggcttattccagatgggtcacaaaagataagttag

SEQ ID NO: 538 - DNA, 3282 bp, Siratro latent polerovirus
  source 1..3282: mol_type = other DNA
atgaactcttcggtcgttgctttgtttttcttttgtcttttctgctgcgcggcccccgcaacatatgccggggtcaattccttcaattccgggggatttatacccggaaattttactgcgcagcactctgccacagattgggggttcatatccccctttctgactccctcaagcgccaaattaaatttcgtatcaatcgaatgcgctttaccgagggaatgtccagagccaccagcgcctacctacaaagggctcattcagagtctgtgggcgctcgtcttgagcgacgcaaagacgtcctcattggcggtaagcttgaaactgagaaatttttatctgcttactgccgccaccttgagcaaggggttccggaccctcgtccacaatttttgttggttgatggtttatgtctggttctccatactttggcggaccattgctacaatatggcatttggtgatcagcaacttcggtctcgtagtttgcgccgccttgctttatgccttgactctactcttggcaaaggtggcctcatggctttttgggcaaatgcccatttacctcgctcttacattgatcaaatttccgaggtacatctggcagagacgaccctggggaaagagctcaagggtctatgaggaggaaaagtgctgtgagcagtacctgtcattcaaaatcaaacaggaccctccaaagaaatgtcaagtcgtattccaaaacgacgagggtaaacactgcggctatggtacgtgtatcagattatttaatggtaccaatggcctaatcacagcttatcacgtggcttccaccgccacaaaggttgtttccacaagaacagggacgaaaattcccctgtctcaatttgaacctttgatggtgtcccaacaatatgaccaggcgctctacgccggtccaaaagaatgggagtcactcttgggttgcaaaggagtaaactttgtccccgccaagaccctcggcgcttgcaatgcgtcgatatacttcattgaaaaagatgggtcttggggctgctccaatgcaaagattgaaggccagttgaagttccacgatgtgtcccgcgatggcggcaagactttccgtgatgcacttcctggtcaactttccgttttgagcaacactgagcccggctattctggtgccggctatttcaacggaaagactctcgtggctgtacacgtagggggctcacttgagtgtgaggactcggattctacttacaatgtggctgtcccggtcctgcccaaagctgggttaaccgctcctttatacgtgtttgagacaactgcgcccacctcaggtgttttcgacacaaagactgttgaacacctcactgaaatcttcgatagggagatgaggtggatgaattccaagcgcgagaaaggggaagtgttatgggcagacatggaggatgatctaccatatcaggctgaaagtgaccaagaaaccatcagcccttcccaaaacctctcccggcgcctccacaagctccgagtcgggaaacgagaagagcggctccgaccgcttaccaaccggaaaagtccccgctgtcccaagaagcgaggcctccgccacccaagtaaaagatataccatcaggagaacaactgatgaagatgttggtggagaggattgccgccaatataaacctgaaagaggtcgagaaggcctcagtggcggcaatttccgagcaggccctgaagaagccgagccgttcgtccagacgacgacggaactcgaagagcggaggcgccaatggcgctcaaaagcagacaactactcccgctacttccactcccactaccaatgggaagtatcaggcgccccacaagaggtcgccggcttcaggcactgcggcaaagccccccaatggtaccacccaaagcagaaacaagaatgtgggtggggggaagaggtcatccggaaacatcccgcactgggtcagaaaaccagcgggttcgggtggccccaattcggtagccaggccgaattgaaatccttgcggctacaagccgcgaggtggctggaccgcgcccagtcggcagaagtgccgtcccctgctgagagggagcgcgtgataagacgactggtggttgactatcggcaagctcaatccgtcaaccccgtcgctacaatgagtggggaactgctgtgggatgattttctacaatcttttaaagaagcagtttcctctttgcaacttgacgctggagtaggagttccctacgtggctctgggtaaaccaacccatcgtagcctagtggaggaccctgaaatgctccccgtgttggctcgcctcacctttgaccgtttagagaagttgtcgaaggttgatgctggaagactcacggctgaagagctagtgcaacaggggttgtgtgaccccatccgcgtctttgtgaagggtgagccccacaaaaagagcaaactcgatgagggacgctaccgcctcatcatgagcgtatcactggtcgatcaattggtggcccgggttttgtttcaggagcaaaacaagaaggaaatacaacaatggagggtcgtgccctctaaacccggtttcggattgtccacggacggacaagtgtcagagttcacagaagctctggcccacaaggtgggggtaacgccccaggaattaattgctaattggcgtgatcaccttgtgcccactgattgctccggttttgactggagcgttgcggactggatgcttgatgatgatatagaagtccgtaaccgcctcaccagaggtctgacccccatcacggctgcaatgcgtcgtgcttggaaacattgcatagcgaattctgtgctgtgcttgtctgacgggactctgctggcccaatgtgtgcccggagtacaaaagagtggtagctacaatactagctcctctaactcccgaatcagggtcatgtgcgcctaccacgccggcgctacctggtgttgtgccatgggcgatgacgccctggaatcagtggactctaacctagcggagtataaaaggctaggtttaaaagtcgaggtgagtggaaaactggaattctgttctcatatctttgagtcaccctccctcgccacccctgtgaatgtaggcaaaatgctctacaaacttatattcggctacaatccagggtgtgcaaatctcgaggtcatcgccaactacttggctgcctgcttttctgtgtttaatgagttaaggcatgaccccgagttggtcctccaactgtatgagtggctggttcttccagtccaggcacaaaagatataa

SEQ ID NO: 539 - DNA, 1083 bp, Arabidopsis thaliana
  source 1..1083: mol_type = other DNA
atggctactgggcaggttctgtttcagcgattctattgcaagaagtctttggctaaatttgatgtcaagatagttgctgccagctgtgtatggcttgcatcaaaactggaagaaaaccctaaaaaagctagacaggtcatcatcgtattccacaggatggagtgtcgcagggagaacttgccattagaacatctggatatgtatgccaagaagttctctgagttgaaagttgaattaagcagaactgagagacatatactgaaagagatgggttttgtttgtcatgttgaacatcctcacaagttcatatcaaactaccttgccacattagaaacacctccagaattgaggcaagaagcttggaatttggccaatgatagtctgcgtacaaccctctgtgtaaggttcagaagtgaggttgtggcttgtggggtagtgtatgctgctgctcgtaggtttcaagtaccactccctgagaatccgccgtggtggaaagcatttgatgcagataaatctagtattgacgaagtgtgtagagttcttgctcatttatacagtcttccaaaggctcagtatatctctgtttgcaaggatgggaagccatttacattttctagcaggtccgggaattctcaaggtcaatcagcgacaaaggatctgttgccgggagcaggcgaggctgttgatactaaatgtactgcaggatcagctaataacgacttgaaggatggaatggttactacaccacacgaaaaggctacagattccaagaaaagtggtaccgagtcaaactctcagccaattgtaggagactcaagctatgaaagaagtaaagtaggagatagagaaagagagagtgatagagagaaggaacgaggtagagagagggacaggggtaggtctcacagaggcagagattctgacagagacagtgatagggagagagacaaactcaaagatcgaagtcatcatcggtcaagagacagattgaaggattcaggtggacattcagataaatcaaggcatcattcttctcgggaccgtgactaccgcgactcatcgaaagaccgtcgtaggcaccat

SEQ ID NO: 540 - DNA, 2586 bp, Solanum lycopersicum
  source 1..2586: mol_type = other DNA
atggctgaaattcttcttacatcagtaatcaataaatctgtagaaatagctggaaatttactgattcaagaaggaaagcgtttatattggttgaaagaggatatcgattggctccagagagaaatgagacacattcgatcttatgttgacaacgcaaaggccaaggaagctggaggtgattcaagggtcaaaaacttattgaaagatattcaagaattggcaggtgatgtggaggatctcttagatgacttccttccaaaaattcaacaatccaataagttcaattattgccttaagaggagttcttttgcagatgagtttgctatggagattgagaagataaagagaagggttgttgacattgaccgaataaggaaaacttacaacatcatagatacagataacaataatgatgattgtgttctgctggatcggagaagattattcctacatgctgatgaaacagagatcatcggtttggatgatgacttcaatatgctacaagccaaattacttaatcaagatttgcattatggagttgtttccatagttggcatgcccggtctggggaaaacaactcttgccaagaaactttataggctcattcgtgatcaatttgagtgttctggactggtctacgtttcacaacagccaagagcgagtgaaatcttacttgacattgccaaacaaattggactgacggaacagaaaatgaaggaaaatttggaggacaacctgcgatcactcttgaaaataaaaaggtatgttatcctcctagatgacatttgggatgtggaaatttgggatgatctgaaacttgtccttcctgaatgtgattcaaaagtcggcagtagaatgataatcacgtctcgaaatagtaatgtaggcagatacataggaggggaatcctccctccatgcattgcaacccctagaatccgagaaaagctttgaactctttaccaagaaaatctttaattttgatgataataatagttgggccaatgcttcacctgacttggtgaatattggtagaaatatagttgggagatgtggaggtataccgctagccatagtggtgactgcaggcatgttaagggcaagagaaagaacagaacatgcgtggaacagagtacttgagagtatgggccataaagttcaagatggatgtgctaaggtattggctctcagttacaatgatttacctattgcctcaaggccatgtttcttgtactttggcctttaccccgaggaccatgaaattcgtgcttttgatttgataaatatgtggattgctgagaagtttatagtagtaaatagtggtaataggcgagaggctgaggatttggcggaggacgtcctaaatgatttggtttctagaaacttgattcaacttgccaaaaggacatataatggaagaatttcaagttgtcgcatacatgacttgttacatagtttgtgtgtggacttggctaaggaaagtaacttctttcacaccgcgcatgatgcatttggtgatcccggcaatgttgctaggctccgaaggattacattctactctgacaatgtcatgattgagttcttccgttcaaatcctaagcttgagaagcttcgtgtacttttctgtttcgcaaaagacccttccatattttctcatatggcttattttgacttcaaattgttgcacacattggttgtagtcatgtctcaaagttttcaagcatatgtcactatcccaagcaaatttgggaacatgacttgcttacgctatctgagattggaggggaatatttgtggaaaactgccaaatagtattgtcaagctcacacgtctagagaccatagacattgatcgacgtagcctcattcaacctccttctggtgtttgggagtctaaacatttgagacatctttgttatagagattatggacaagcatgtaacagttgcttttctataagctcattttacccaaatatttactcattgcatcctaacaatctacaaaccttgatgtggatacctgataaattttttgaaccgaggttgttgcaccgattgatcaatttaagaaaactgggtatactgggagtgtccaattctaccgttaagatgttatcaatatttagccctgtgcttaaggcgctggaggttctgaagctcagtttttccagtgacccgagtgaacaaataaagttgtcatcgtatccacatattgctaagttgcatttgaatgttaacagaacaatggccttgaactctcaatcatttcctccaaatctcatcaagcttactctagcctactttagtgtagaccgttatatactggcagtacttaagacatttcccaaattaagaaaacttaaaatgttcatctgcaagtataatgaagaaaagatggatctctcgggcgaggcaaatggttatagctttccgcaacttgaagttttgcatattcatagcccgaatgggttgtctgaagtaacgtgcacggatgatgtcagtatgcccaaattgaaaaagctgttacttacaggattccattgccgaatcagtttatcggaacggcttaaaaagctgagtaaatga

SEQ ID NO: 541 - DNA, 3156 bp, Solanum tuberosum
  source 1..3156: mol_type = other DNA
atggcttatgctgctgttacttcccttatgagaaccatacatcaatcaatggaacttactggatgtgatttgcaaccgttttatgaaaagctcaaatctttgagagctattctggagaaatcctgcaatataatgggcgatcatgaggggttaacaatcttggaagttgaaatcgtagaggtagcatacacaacagaagatatggttgactcggaatcaagaaatgtttttttagcacagaatttggaggaaagaagcagggctatgtgggagatttttttcgtcctggaacaagcactagaatgcattgattccaccgtgaaacagtggatggcaacatcggacagcatgaaagatctaaaaccacaaactagctcgcttgtcagtttacctgaacatgatgttgagcagcccgagaatataatggttggccgtgaaaatgaatttgagatgatgctggatcaacttgctagaggaggaagggaactagaagttgtctcaatcgtagggatgggaggcatcgggaaaacaactttggctacaaaactctatagtgatccgtgcattatgtctcgatttgatattcgtgcaaaagcaactgtttcacaagagtattgtgtgagaaatgtactcctaggccttctttctttgacaagtgatgaacctgatgatcagctagcggaccgactgcaaaagcatctgaaaggcaggagatacttggtagtcattgatgacatatggactacagaagcttgggatgatataaaactatgtttcccagactgttataatggaagcagaatactcctgactactcggaatgtggaagtggctgaatatgctagttcaggtaagcctcctcatcacatgcgcctcatgaattttgacgaaagttggaatttactacacaaaaagatctttgaaaaagaaggttcttattctcctgaatttgaaaatattgggaaacaaattgcattaaaatgtggaggattacctctagcaattactgtgattgctggacttctctccaaaatgggtcaaagattagatgagtggcaaagaattggggaaaatgtaagttcggtcgttagcacagatcctgaagcacaatgcatgagagtgttggctttgagttaccatcacttgccttctcacctaaaaccgtgttttctgtattttgcaattttcacagaggatgaacagatttctgtaaatgaacttgttgagttatggcctgtagagggatttttgaatgaagaagagggaaaaagcatagaagaggtggcaacaacatgtataaacgaacttatagatagaagcttaattttcatccacaattttagttttcgtggaacaatagaaagttgtggaatgcatgatgtgacccgtgaactctgtttgagggaagctcgaaacatgaattttgtgaatgttatcagaggaaagagtgatcaaaattcatgtgcacaatccatgcagcgttcctttaagagtcgaagtcggatcagaatccataaggtggaagaattggcttggtgtcgtaacagtgaggctcattctattatcatgttgggtggattcgaatgcgtcacactggaattgtctttcaagctagtaagagtactagatcttggtttgaatacatggccaatttttcccagtggagtactttctctaattcatttgagatacctatctttgcgttttaatccttgcttacagcagtatcaaggatcgaaagaagctgttccctcatcaataatagacattcctctatcgatatcaagcctatgctatctgcaaacttttaaacttaaccttccatttcccagttattatcctttcatattaccatcggaaattttgacgatgccacaattgaggacgctgtgtatgggctggaattacttgcggagtcatgagcctacagagaacagattggttttgaaaaatttgcaatgcctcaatcaattgaaccctcggtattgtacagggtctttttttagactatttcccaatttaaagaagttgcaagtatttggcgtcccagaagactttcgcaatagccaggacctgtatgattttcgctacttatatcagctcgaagaattgacatttcgtttatattatccatatgctgcttgctttctaaaaaacactgcaccttcaggttctacgcaagatcctctgaggtttcagacggaaatattgcacaaagagattgatttcgggggaactgcacctccaactttactcttacctcctccggatgcttttccacaaaaccttaagagtttaacttttaggggagaattctctgtggcatggaaggatttgagcattgttggtaaattacccaaactcgaggtccttatactatcatggaatgccttcataggcaaggagtgggaagtagttgaggaagggtttcctcacttgaagttcttgtttctggatgatgtatacattcgatactggagagctagtagtgatcactttccgtaccttgaacgagttattcttagagattgccgtaatttggattcaatccctcgagattttgcagatataaccacactagctcttattgatatagattactgtcaacaatctgttgtgaattccgccaagcaaattcaacaggacattcaagacaactatggaagctctatcgaggtccatactcgtcatcttttgtaagacatcttcttccttgctttacaacaataattaactcatcatcatagtaaactcgataataatctggataatagccttagtaagtcaaattgcaccaattcaacaaaagttcttgatgctgtcattgtgtttgatttgaatccttccaatattgtgtaacttgttatacttgcatgttcattcttgattttgggaagtgtaacatttcatttttcatcttttgtggctagcattcccaagagtgtgacaacagttgaagatgatgatgatagtgtgacaacagatgaagatgatgatgatgatgactttgagaaagaagttgcttcttgccgcaataatgtgtaagttcttatacctgcatgctcattcttgctataatgttctcttgttccttaattatgggacatctgacatattattttccatgttttgcgtcttttatttttctgcagcgag

SEQ ID NO: 542 - DNA, 480 bp, Tobacco mosaic virus
  source 1..480: mol_type = other DNA
atgtcttacagtatcactactccatctcagttcgtgttcttgtcatcagcgtgggccgacccaatagagttaattaatttatgtactaatgccttaggaaatcagtttcaaacacaacaagctcgaactgtcgttcaaagacaattcagtgaggtgtggaaaccttcaccacaagtaactgttaggttccctgacagtgactttaaggtgtacaggtacaatgcggtattagacccgctagtcacagcactgttaggtgcattcgacactagaaatagaataatagaagttgaaaatcaggcgaaccccacgactgccgaaacgttagatgctactcgtagagtagacgacgcaacggtggccataaggagcgcgataaataatttaatagtagaattgatcagaggaaccggatcttataatcggagctctttcgagagctcttctggtttggtttggacctctggtcctgcaacttga

SEQ ID NO: 543 - DNA, 795 bp, Soybean mosaic virus
  source 1..795: mol_type = other DNA
tcaggcaaggagaaggaaggagacatggatgcaggtaaggatccaaagaagaataccagcagtagcaaaggagctggtacaagcagcaaagatgtaaatgttggatcaaaaggaaaggtggttccgcgtttgcagaagattacaaggaagatgaatcttccaatggttgaagggaagatcattcttagcttggaccacttgcttgagtacaaacctaatcaggttgatttattcaatactcgagcaacaagaacacagtttgaagcgtggtacaatgcagttaaagatgaatatgagcttgatgatgagcagatgggtgtggtcatgaatggtttcatggtttggtgtattgacaatggcacttctccagatgccaatggcgtgtgggtgatgatggatggagaggaacagattgaatatccgctgaagccaattgtcgaaaatgcaaaaccaactttgagacaaatcatgcatcatttttcagatgcagcagaagcttacattgagatgagaaattctgaaagtccgtatatgcctagatatggactgttaaggaatttgagagatagagagctagcccgctatgcttttgacttctatgaggtcacttctaaaacaccaaacagggcaagggaagcaatagcgcaaatgaaggctgcagctctctcgggagttaacaacaagttgtttggacttgatggaaatatctcaaccaactccgaaaatactgaaaggcacactgcaagggatgtgaatcaaaacatgcacactcttctgggcatgggcccaccgcag

SEQ ID NO: 544 - DNA, 654 bp, Cucumber mosaic virus
  source 1..654: mol_type = other DNA
atggacaaatctgaatcaaccagtgccggtcgtaatcgtcgacgtcgtctgcgtcgcggttcccgctccgcctcctcctccgcggatgctacatttagagtcctgtcgcaacagctttcgcgacttaataagacgttagcagctggtcgtcctactattaaccacccaacctttgtgggtagtgagcgttgtaaacctggatacacgttcacctcgattaccctgaagccaccgaaaatagacaaggggtcttattatggcaaaaggttgttacttcctgattcagtcactgagttcgataagaagcttgtttcgcgcattcaaattcgagttaatcctttgccgaaatttgattctaccgtgtgggtgacggtccgtaaagttcctgcctcctcggacctgtctgtatccgccatctctgctatgtttgcggacggagcctcaccggtactggtttatcagtatgctgcatctggcgttcaagccaataacaaattgttatatgatctttcagtgatgcgcgctgatattggtgacatgagaaagtacgccgtgctcgtgtattcaaaagacgatgcgcttgagacggacgaactagtacttcatatcgacatcgagcaccaacgcattcccacgtctggggtgctcccagtt

SEQ ID NO: 545 - DNA, 708 bp, Potato virus X
  source 1..708: mol_type = other DNA
atgactacaccagccaacaccactcaagctgtaggatccaccaaatcaactaccaccaccactgcaggcgcaactcctgccaattcagggctattcaccataccagatggggacttcttcagcaccgcaaaggctgtggtcgctagcaatgccgtggccaccaacgaggatctcgccaaaatacaggaaatctggaaggacaagaaaattccttcagacactatggctcaggcagcttgggacttagtgagacactgtgccgacgtcgggtcctctgcccaaactgaaatgataggcaccggtccatactccaatggggtcagccgggctagactggcagctgcaattaaagaggtgtgcacactgaggcagttctgcaaaaagtatgcccccgtggtctggaactggatgctcacaaacaacagcccaccggccaactggcaggcacaaggcttcaagccggagcacaaattcgcagcctttgacttctttgatggagtcactaatcccgcagctatcactcccaaagaggggctcatgagacctccgtctgaagcagaaatgaatgccgcccaaactgctgcctttgtgaagatcaccaaggcgagggcgcaatccaacgactttgccagtctggatgccgcggtcactaggggccgcatcacaggaacgactgttgcagaagcagttgtttcactacccccacca

SEQ ID NO: 546 - DNA, 774 bp, Tomato spotted wilt virus
  source 1..774: mol_type = other DNA
atgtctaaggttaagctcactaaggaaagcattgttgctttgttgacacaaggcaaagaccttgagtttgaggaagatcagaatctggtagcattcaacttcaagactttttgtctggaaaacatcgaccagatcaagaagatgagcgttatttcatgtctgacattcctaaagaatcgtcagagcataatgaaggttattaagcaaagcgattttacttttggtaaaattaccataaagaaaacttcagacaggattggaggcactgacatgaccttcagaaggcttgatagcttgatcagggtcaggcttgttgaagaaactgggaattctgagaatctcaatactatcaaatctaagattgcttcccatcctttgattcaagcctatggattacctctcgatgatgcaaagtctgtgagacttgccataatgctgggaggtagcttacctcttattgcttcagttgatagctttgagatgatcagtgttgtcttggctatatatcaggatgcaaaatacaaggacctcgggatcgacccaaagaagtatgacaccaaggaagccttaggaaaagtttgcactgtgctgaaaagcaaagcatttgaaatgaatgaagatcaggtgaagaaggggaaagagtatgctgctatacttagctccagcaatcctaatgctaaagggagtgttgctatggaacattacagtgaaactcttaacaagttctatgaaatgttcggggttaaaaagcaggcaaaactcgcagaacttgct

SEQ ID NO: 547 - DNA, 777 bp, Glycine max
  source 1..777: mol_type = other DNA
atgagtggtagcaacgatggtagcggcagctggagctctaggtttttgaaggtggctagtgcagctgccgctacagccgccgttgccggcggtttatatgccattctttcatcctcaacctctgctagctctgagatggaagtgccgtttggcagcgcacggcctgagagcaacactaagcgacaacaagagtcattctatgagcacgaagaaactgaggatgacgaagaatctgaggaggcagacaatgggaaatggaagaaacctgagagtggttgggtgaagctgaatgtggatggttcacgtattcatgaagaacccgcctctgcgggttgtggtggggttataagggacgaatggggaacatggtgcgtgggctttgatcagaaattggaccccaacatttgtcgacaagcccattatacagagttacaagctattctaacgggcctgaaggtggctcgggaggacatgatcaatgtggaaaaactggttgtggagtcagacagtgagcccgcggtgaacatggtgaagagtgggcttgggtacaagtatcatcgtccagagtataaggttgttcaagacataaataggcttcttaaagatcctaagtggctagcgaggttggattatgttcctaggaaagctaatcgagtcgctaattacctcgccaagcgtgtttgtaaaccgtcttctcctcatgatcatcatcatttcagcaagtatccttgtcccccggattacgattgtgaaaagattttcttggaggataacaat

SEQ ID NO: 548 - protein, 361 aa, Arabidopsis thaliana
MATGQVLFQRFYCKKSLAKFDVKIVAASCVWLASKLEENPKKARQVIIVFHRMECRRENLPLEHLDMYAKKFSELKVELSRTERHILKEMGFVCHVEHPHKFISNYLATLETPPELRQEAWNLANDSLRTTLCVRFRSEVVACGVVYAAARRFQVPLPENPPWWKAFDADKSSIDEVCRVLAHLYSLPKAQYISVCKDGKPFTFSSRSGNSQGQSATKDLLPGAGEAVDTKCTAGSANNDLKDGMVTTPHEKATDSKKSGTESNSQPIVGDSSYERSKVGDRERESDREKERGRERDRGRSHRGRDSDRDSDRERDKLKDRSHHRSRDRLKDSGGHSDKSRHHSSRDRDYRDSSKDRRRHH

SEQ ID NO: 549 - protein, 1246 aa, Solanum peruvianum
MAENEIEEMLEHLRRIKSGGDLDWLDILRIEELEMVLRVFRTFTKYNDVLLPDSLVELTKRAKLIGEILHRLFGRIPHKCKTNLNLERLESHLLEFFQGNTASLSHNYELNNFDLSKYMDCLENFLNDVLMMFLQKDRFFHSREQLAKHRSIKELKIVQKKIRFLKYIYAPEINGYVDYEKQECLENRIQFMTNTVGQYCLAVLDYVTEGKLNEENDNFSKPPYLLSLIVLVELEMKKIFHGEVKASKFTQSKTFKDKKLPKGFSHHLHNLLMYLRNKKLENFPNNIAAQNIDVAIEFLLVFLDADVSNHVINGNWLKEVLLKVGAIAGDILYVIQKLLPRSINKDETSNISLCSIQILEKTKDLKAQVETYYKSLKFTPSQFPTFGGLSFLNSLLRKLNEMSTSKSGLGFLMKPLLGNLEKELSSLTSILEKELSSIFRDVVHHEHNIPKDLQRRTINLSYEAEVAIDSILAQYNAFLHIFCSLPTIVKEIKQINAEVTEMWSADIPLNPHYVAAPLKHLPDRHSNLVTDEEVVGFENKAEELIDYLIRGTNELDVVPIVGMGGQGKTTIARKLYNNDIIVSRFDVRAWCIISQTYNRRELLQDIFSQVTGSDDNGATVDVLADMLRRKLMGKRYLIVLDDMWDCMVWDDLRLSFPDDGIRSRIVVTTRLEEVGKQVKYHTDPYSLPFLTTEESCQLLQKKVFQKEDCPPELQDVSQAVAEKCKGLPLVVVLVAGIIKKRKMEESWWNEVKDALFDYLDSEFEEYSLATMQLSFDNLPHCLKPCLLYMGMFSEDARIPASTLISLWIAEGFVENTESGRLMEEEAEGYLMDLISSNLVMLSKRTYKGRVKYCQVHDVVHHFCLEKSREAKFMLAVKGQYIHFQPSDWKGTRVSFSFSEELSKFASLVSKTQKPFHQHLRSLITTNRAKSINDIFSCQISELRLLKVLDLSSYIVEFLSLATFKPLNQLKYLAVQAFEFYFDPGSHLPHIETFIVMNLPYYDILLPVSFWEMKKLRHAHFGKAEFDKQGLSEGSSKLENLRILKNIVGFDRVDVLSRRCPNLQQLQITYFGNNEEPFCPKLENLTQLQQLQLSFARPRTLSGLQLPSNLNKLVLEGIHIGCVIPFIAGLPSLEYLQLHDVCFPQSEEWCLGDITFHKLKLLKLVKLNISRWDVSEESFPLLETLVIKKCIDLEEIPLSFADIPTLEQIKLIGSWKVSLEDSAVRMKEEIKDTEGCDRLHLVKQRSD

SEQ ID NO: 550 - protein, 861 aa, Solanum lycopersicum
MAEILLTSVINKSVEIAGNLLIQEGKRLYWLKEDIDWLQREMRHIRSYVDNAKAKEAGGDSRVKNLLKDIQELAGDVEDLLDDFLPKIQQSNKFNYCLKRSSFADEFAMEIEKIKRRVVDIDRIRKTYNIIDTDNNNDDCVLLDRRRLFLHADETEIIGLDDDFNMLQAKLLNQDLHYGVVSIVGMPGLGKTTLAKKLYRLIRDQFECSGLVYVSQQPRASEILLDIAKQIGLTEQKMKENLEDNLRSLLKIKRYVILLDDIWDVEIWDDLKLVLPECDSKVGSRMIITSRNSNVGRYIGGESSLHALQPLESEKSFELFTKKIFNFDDNNSWANASPDLVNIGRNIVGRCGGIPLAIVVTAGMLRARERTEHAWNRVLESMGHKVQDGCAKVLALSYNDLPIASRPCFLYFGLYPEDHEIRAFDLINMWIAEKFIVVNSGNRREAEDLAEDVLNDLVSRNLIQLAKRTYNGRISSCRIHDLLHSLCVDLAKESNFFHTAHDAFGDPGNVARLRRITFYSDNVMIEFFRSNPKLEKLRVLFCFAKDPSIFSHMAYFDFKLLHTLVVVMSQSFQAYVTIPSKFGNMTCLRYLRLEGNICGKLPNSIVKLTRLETIDIDRRSLIQPPSGVWESKHLRHLCYRDYGQACNSCFSISSFYPNIYSLHPNNLQTLMWIPDKFFEPRLLHRLINLRKLGILGVSNSTVKMLSIFSPVLKALEVLKLSFSSDPSEQIKLSSYPHIAKLHLNVNRTMALNSQSFPPNLIKLTLAYFSVDRYILAVLKTFPKLRKLKMFICKYNEEKMDLSGEANGYSFPQLEVLHIHSPNGLSEVTCTDDVSMPKLKKLLLTGFHCRISLSERLKKLSK

SEQ ID NO: 551 - protein, 937 aa, Solanum tuberosum
MAYAAVTSLMRTIHQSMELTGCDLQPFYEKLKSLRAILEKSCNIMGDHEGLTILEVEIVEVAYTTEDMVDSESRNVFLAQNLEERSRAMWEIFFVLEQALECIDSTVKQWMATSDSMKDLKPQTSSLVSLPEHDVEQPENIMVGRENEFEMMLDQLARGGRELEVVSIVGMGGIGKTTLATKLYSDPCIMSRFDIRAKATVSQEYCVRNVLLGLLSLTSDEPDDQLADRLQKHLKGRRYLVVIDDIWTTEAWDDIKLCFPDCYNGSRILLTTRNVEVAEYASSGKPPHHMRLMNFDESWNLLHKKIFEKEGSYSPEFENIGKQIALKCGGLPLAITVIAGLLSKMGQRLDEWQRIGENVSSVVSTDPEAQCMRVLALSYHHLPSHLKPCFLYFAIFTEDEQISVNELVELWPVEGFLNEEEGKSIEEVATTCINELIDRSLIFIHNFSFRGTIESCGMHDVTRELCLREARNMNFVNVIRGKSDQNSCAQSMQRSFKSRSRIRIHKVEELAWCRNSEAHSIIMLGGFECVTLELSFKLVRVLDLGLNTWPIFPSGVLSLIHLRYLSLRFNPCLQQYQGSKEAVPSSIIDIPLSISSLCYLQTFKLNLPFPSYYPFILPSEILTMPQLRTLCMGWNYLRSHEPTENRLVLKNLQCLNQLNPRYCTGSFFRLFPNLKKLQVFGVPEDFRNSQDLYDFRYLYQLEELTFRLYYPYAACFLKNTAPSGSTQDPLRFQTEILHKEIDFGGTAPPTLLLPPPDAFPQNLKSLTFRGEFSVAWKDLSIVGKLPKLEVLILSWNAFIGKEWEVVEEGFPHLKFLFLDDVYIRYWRASSDHFPYLERVILRDCRNLDSIPRDFADITTLALIDIDYCQQSVVNSAKQIQQDIQDNYGSSIEVHTRHLFIPKSVTTVEDDDDSVTTDEDDDDDDFEKEVASCRNNVE

SEQ ID NO: 552 - protein, 159 aa, Tobacco mosaic virus; identical to SEQ ID NO: 26

SEQ ID NO: 553 - protein, 265 aa, Soybean mosaic virus
SGKEKEGDMDAGKDPKKNTSSSKGAGTSSKDVNVGSKGKVVPRLQKITRKMNLPMVEGKIILSLDHLLEYKPNQVDLFNTRATRTQFEAWYNAVKDEYELDDEQMGVVMNGFMVWCIDNGTSPDANGVWVMMDGEEQIEYPLKPIVENAKPTLRQIMHHFSDAAEAYIEMRNSESPYMPRYGLLRNLRDRELARYAFDFYEVTSKTPNRAREAIAQMKAAALSGVNNKLFGLDGNISTNSENTERHTARDVNQNMHTLLGMGPPQ

SEQ ID NO: 554 - protein, 218 aa, Cucumber mosaic virus
MDKSESTSAGRNRRRRLRRGSRSASSSADATFRVLSQQLSRLNKTLAAGRPTINHPTFVGSERCKPGYTFTSITLKPPKIDKGSYYGKRLLLPDSVTEFDKKLVSRIQIRVNPLPKFDSTVWVTVRKVPASSDLSVSAISAMFADGASPVLVYQYAASGVQANNKLLYDLSVMRADIGDMRKYAVLVYSKDDALETDELVLHIDIEHQRIPTSGVLPV

SEQ ID NO: 555 - protein, 236 aa, Potato virus X
MTTPANTTQAVGSTKSTTTTTAGATPANSGLFTIPDGDFFSTAKAVVASNAVATNEDLAKIQEIWKDKKIPSDTMAQAAWDLVRHCADVGSSAQTEMIGTGPYSNGVSRARLAAAIKEVCTLRQFCKKYAPVVWNWMLTNNSPPANWQAQGFKPEHKFAAFDFFDGVTNPAAITPKEGLMRPPSEAEMNAAQTAAFVKITKARAQSNDFASLDAAVTRGRITGTTVAEAVVSLPPP

SEQ ID NO: 556 - protein, 258 aa, Tomato spotted wilt virus
MSKVKLTKESIVALLTQGKDLEFEEDQNLVAFNFKTFCLENIDQIKKMSVISCLTFLKNRQSIMKVIKQSDFTFGKITIKKTSDRIGGTDMTFRRLDSLIRVRLVEETGNSENLNTIKSKIASHPLIQAYGLPLDDAKSVRLAIMLGGSLPLIASVDSFEMISVVLAIYQDAKYKDLGIDPKKYDTKEALGKVCTVLKSKAFEMNEDQVKKGKEYAAILSSSNPNAKGSVAMEHYSETLNKFYEMFGVKKQAKLAELA

SEQ ID NO: 557 - protein, 259 aa, Glycine max
MSGSNDGSGSWSSRFLKVASAAAATAAVAGGLYAILSSSTSASSEMEVPFGSARPESNTKRQQESFYEHEETEDDEESEEADNGKWKKPESGWVKLNVDGSRIHEEPASAGCGGVIRDEWGTWCVGFDQKLDPNICRQAHYTELQAILTGLKVAREDMINVEKLVVESDSEPAVNMVKSGLGYKYHRPEYKVVQDINRLLKDPKWLARLDYVPRKANRVANYLAKRVCKPSSPHDHHHFSKYPCPPDYDCEKIFLEDNN

SEQ ID NO: 558 - DNA, 3774 bp, Solanum lycopersicum
  source 1..3774: mol_type = other DNA
atggaaaaacgaaaagatattgaagaagcaaacaactcattggtgttattttctgctcttagcaaggacattgccaatgttctaattttcctagagaatgaggaaaatcaaaaagctcttgacaaagatcaagttgaaaagctaaaattgaaaatggcatttatttgtacatatgttcagctttcttattccgattttgagcagtttgaagatataatgactagaaatagacaagaggttgagaatctgcttcaatcacttttggatgatgatgtccttactagcctcaccagtaatatggatgactgtatcagcttgtatcatcgttcttataaatcagatgccatcatgatggatgagcaattggacttcctcctcttgaatctgtatcatctatccaagcatcacgctgaaaagatatttcctggagtgactcaatatgaagttcttcagaatgtatgtggcaacataagagatttccatgggttgatactgaatggttgcattaagcatgagatggttgagaatgtcttacctctgtttcaactcatggctgaaagagtaggacacttcctttgggaggatcagactgatgaagactctcggctctccgagctagatgaggatgaacacaatgatagagactctcgactcttccagctaacacatctactcttgaagattgttccaactgaactggaggttatgcacatatgttatacaaatttgaaagcttcaacttcagcagaagttggacgcttcattaagaagctcctggaaacctcaccggatattctcagagaatatatcattcaactacaagagcatatgttaactgttattccccctagcactttaggggctcgaaacattcatgtcatgatggaattcctattacttattctttctgatatgcccaaggactttattcatcatgacaaactttttgatctcttggctcatgttggaacacttaccagggaggtatcgactcttgtacgtgacttggaagagaaattaaggaataaagagggtaataaccaaacaaattgtgcaaccctagacttgctggaaaatattgaactcctcaagaaagatctcaaacatgtttatctgaaagccccaaattcatctcaatgttgcttccccatgagtgatggaccactcttcatgcatcttctacacatgcacttaaatgatttgctagattctaatgcttattcaatttctttgataaaggaagaaatcgagttggtgagtcaagaactggaattcataagatcattctttggggatgctgctgagcaaggattgtataaagatatctgggcacgtgttctagatgtggcttatgaggcaaaagatgtcatagattcaattattgttcgagataatggtctcttacatcttattttctcacttcccattaccataaagaagatcaaacttatcaaagaagagatctctgctttagatgagaacattcccaaggacagaggtctaatcgttgtgaactctcccaagaaaccagttgagagaaagtcattgacaactgataaaataattgtaggttttgaggaggagacaaacttgatacttagaaagctcaccagtggacccgcagatttagatgtcatttcgatcaccggtatgccgggttcaggtaaaactactttggcatacaaagtatacaatgataagtcagtttctagacattttgaccttcgtgcatggtgcacggtcgatcaaggatatgacgacaagaagttgttggatacaattttcagtcaagttagtggctcagattcaaatttgagtgagaatattgatgttgctgataaattgcggaaacaactgtttggaaagaggtatcttattgtcttagatgatgtgtgggatactactacattggatgagttgacaagaccttttcctgaagctaagaaaggaagtaggattattttgacaactcgagaaaaggaagtggctttgcatggaaagctgaacactgatcctcttgaccttcgattgctaagaccagatgaaagttgggaacttttagataaaaggacatttggtaatgagagttgccctgatgaactattagatgtcggtaaagaaatagccgaaaattgtaaagggcttcctttggtggctgatctgattgctggagtcattgctgggagggaaaagaaaaggagtgtgtggcttgaagttcaaagtagtttgagttcttttattttgaacagtgaagtggaagtgatgaaagttatagaattaagttatgaccatttaccacatcacctcaagccatgcttgcttcactttgcaagttggccgaaggacactcctttgacaatctatttgtttactgtttatttgggtgctgaaggatttgtggaaaagacggagatgaagggtatagaagaagtggtgaagatttatatggatgatttaatttccagtagcttggtaatttgtttcaatgagataggtgatatactgaatttccaaattcatgatcttgtgcatgacttttgtttgataaaagcaagaaaggaaaatttgtttgatcggataagatcaagtgctccatcagatttgttgcctcgtcaaattaccattgattatgatgaggaggaggagcactttgggcttaattttgtcatgttcgattcaaataagaaaaggcattctggtaaacacctctattctttgaggataaatggagaccagctggatgacagtgtttctgatgcatttcacctaagacacttgaggcttattagagtgttggacctggaaccctctttaatcatggtgaatgattctttgctgaatgaaatatgcatgttgaatcatttgaggtacttaagaattcggacacaagttaaatatctgcctttctctttctcaaacctctggaatctagaaagtctgtttgtgtctaacaaaggatcaatcttggtactattaccgagaattttggatcttgtaaagttgcgagtgctgtccgtgggtgcttgttctttctttgatatggatgcagatgaatcaatattgatagcaaaggacacaaagttagagaacttgagaatattaggggaactgttgatttcctattcgaaagatacaatgaatattttcaaaaggtttcccaatcttcaggtgcttcagtttgaactcaaggagtcatgggattattcaacagagcaacattggttcccgaaattggattgcctaactgaactagaaacactctgtgtaggttttaaaagttcaaacacaaaccactgtgggtcctctgttgtgacaaatcggccgtgggattttcacttcccttcaaatttgaaagaactgttgttgtatgactttcctctgacatccgattcactatcaacaatagcgagactgcccaaccttgaaaatttgtccctttatgatacaatcatccagggagaagaatggaacatgggggaggaagacacttttgagaatctcaaatttttgaacttgcgtctactgactctttccaagtgggaggttggagaggaatccttccccaatcttgagaaattaaaactgcaggaatgtggtaagcttgaggagattccacctagttttggagatatttattcattgaaatttatcaaaattgtaaagagtcctcaacttgaagattctgctctcaagattaagaaatacgctgaagatatgagaggagggaacgatcttcagatccttggccagaagaatatccccttatttaagtag

SEQ ID NO: 559 - DNA, 2739 bp, Glycine max
  source 1..2739: mol_type = other DNA
atggcttatgctgctgttacttcccttatgagaaccatacatcaatcaatggaacttactggatgtgatttgcaaccgttttatgaaaagctcaaatctttgagagctattctggagaaatcctgcaatataatgggcgatcatgaggggttaacaatcttggaagttgaaatcatagaggtagcatacacaacagaagatatggttgactcggaatcaagaaatgtttttttagcacggaatgtggggaaaagaagcagggctatgtgggggatttttttcgtcttggaacaagcactagaatgcattgattccaccgtgaaacagtggatggcaacatcggacagcatgaaagatctaaaaccacaaactagctcacttgtcagtttacctgaacatgatgttgagcagcccgagaatataatggttggccgtgaaaatgaatttgagatgatgctggatcaacttgctagaggaggaagggaactagaagttgtctcaatcgtagggatgggaggcatcgggaaaacaactttggctgcaaaactctatagtgatccttacattatgtctcgatttgatattcgtgcaaaagcaactgtttcacaagagtattgtgtgagaaatgtactcctaggccttctttctttgacaagtgatgaacctgattatcagctagcggaccaactgcaaaagcatctgaaaggcaggagatacttggtagtcattgatgacatatggactacagaagcttgggatgatataaaactatgtttcccagactgcgataatggaagcagaatactcctgactactcggaatgtggaagtggctgaatatgctagctcaggtaagcctcctcatcacatgcgcctcatgaattttgacgaaagttggaatttactacacaaaaagatctttgaaaaagaaggttcttattctcctgaatttgaaaatattgggaaacaaattgcattaaaatgtggagggttacctctagcaattactttgattgctggacttctctccaaaatcagtaaaacattggatgagtggcaaaatgttgcggagaatgtacgttcggtggtaagcacagatcttgaagcaaaatgcatgagagtgttggctttgagttaccatcacttgccttctcacctaaaaccgtgttttctgtattttgcaattttcgcagaggatgaacggatttatgtaaataaacttgttgagttatgggccgtagaggggtttttgaatgaagaagagggaaaaagcatagaagaggtggcagaaacatgtataaacgaacttgtagatagaagtctaatttctatccacaatgtgagttttgatggggaaacacagagatgtggaatgcatgatgtgacccgtgaactctgtttgagggaagctcgaaacatgaattttgtgaatgttatcagaggaaagagtgatcaaaattcatgtgcacaatccatgcagtgttcctttaagagtcgaagtcggatcagtatccataatgaggaagaattggtttggtgtcgtaacagcgaggctcattctatcatcacgttgtgtatattcaaatgcgtcacactggaattgtctttcaagctagtaagagtactagatcttggtttgactacatgcccaatttttcccagtggagtactttctctaattcatttgagatacctatctttgcgttttaatcctcgcttacagcagtatcgaggatcgaaagaagctgttccctcatcaataatagacattcctctatcgatatcaagcctatgctatctgcaaacttttaaactttaccatccatttcccaattgttatcctttcatattaccatcggaaattttgacaatgccacaattgaggaagctgtgtatgggctggaattacttgcggagtcatgagcctacagagaacagattggttttgaaaagtttgcaatgcctcaatgaattgaatcctcggtattgtacagggtcttttttaagactatttcccaatttaaagaagttggaagtatttggcgtcaaagaggactttcgcaatcacaaggacctgtatgattttcgctacttatatcagctcgagaaattggcatttagtacttattattcatcttctgcttgctttctaaaaaacactgcacctttaggttctactccgcaagatcctctgaggtttcagatggaaacattgcacttagagactcattccagggcaactgcacctccaactgatgttccaactttcctcttacctcctccggattgttttccacaaaaccttaagagtttaacttttagcggagatttctttttggcatggaaggatttgagcattgttggtaaattacccaaactcgaggtccttcaactatcacacaatgccttcaaaggcgaggagtgggaagtagttgaggaagggtttcctcacttgaagttcttgtttctggatagcatatacattcggtactggagagctagtagtgatcactttccataccttgaacgactttttcttagcgattgcttttatttggattcaatccctcgagattttgcagatataaccacactagctcttattgatatatttcgctgccaacaatctgttgggaattccgccaagcaaattcaacaggacattcaagacaactatggaagctctatcgaggtccatactcgttatctttatcgaaatggagcatttttggtagtgtga

SEQ ID NO: 560 - DNA, 2565 bp, Glycine max
  source 1..2565: mol_type = other DNA
atggtagtagcagtggagaaaaccaacctcacttcacaatcacaatgcttcaaccgtgtttctgacaagaagaaagaaagatgcaagacacacatgaacaacgttaacccatgttgttttttgtttctcttatgtgtgtggagccttgttgtgctcccctcatgcgtgaggccagttttgtgtgaagatgaaggttgggatggagtggttgtgacagcatcaaacctcttagcacttgaagctttcaagcaagagttggttgatccagaagggttcttgcggagctggaatgacagtggctatggagcttgttccggaggttgggttggaatcaagtgtgctaagggacaggttattgtgatccagcttccttggaagggtttgaggggtcgaatcaccgacaaaattggtcaacttcaaggcctcaggaagcttagtcttcatgataaccaaattggtggttcaatcccttcaactttgggacttcttcccaaccttagaggggttcagttattcaacaataggcttacaggttccatacctctttctttaggtttctgccctttgcttcagtctcttgacctcagcaacaacttgctcacaggagcaatcccttatagtcttgctaattccactaagctttattggcttaacttgagtttcaactccttctctggtcctttaccagctagcctaactcactcattttctctcacttttctttctcttcaaaataacaatctttctggctcccttcctaactcttggggtgggaattccaagaatggcttctttaggcttcaaaatttgatcctagatcataactttttcactggtgacgttcctgcttctttgggtagcttaagagagctcaatgagatttcccttagtcataataagtttagtggagctataccaaatgaaataggaaccctttctaggcttaagacacttgacatttctaataatgccttgaatgggaacttgcctgctaccctatctaatttatcctcacttacactgctgaatgcagagaacaacctccttgacaatcaaattcctcaaagtttaggtagattgcgtaatctttctgttctgattttgagtagaaaccaatttagtggacatattccttcaagtattgcaaacatttcctcgcttaggcagcttgatttgtcactgaataatttcagtggagaaattccagtctcctttgacagtcagcgcagtctaaatctcttcaatgtttcctacaatagcctctcaggttctgtcccccctctgcttgccaagaaatttaactcaagctcatttgtgggaaatattcaactatgtggatacagcccttcaaccccatgtctttcccaagctccatcacaaggagtcattgccccacctcctgaagtgtcaaaacatcaccatcataggaagctaagcaccaaagacataattctcatagtagcaggagttctcctcgtagtcctgattatactttgttgtgtcctgcttttctgcctgatcagaaagagatcaacatctaaggccgggaacggccaagccaccgagggtagagcggccactatgaggacagaaaaaggagtccctccagttgctggtggtgatgttgaagcaggtggggaggctggagggaaactagtccattttgatggaccaatggcttttacagctgatgatctcttgtgtgcaacagctgagatcatgggaaagagcacctatggaactgtttataaggctattttggaggatggaagtcaagttgcagtaaagagattgagggaaaagatcactaaaggtcatagagaatttgaatcagaagtcagtgttctaggaaaaattagacaccccaatgttttggctctgagagcctattacttgggacccaaaggggaaaagcttctggtttttgattacatgtctaaaggaagtcttgcttctttcctacatggtggtggaactgaaacattcattgattggccaacaagaatgaaaatagcacaagacttggcccgtggcttgttctgccttcattcccaggagaacatcatacatgggaacctcacatccagcaatgtgttgcttgatgagaatacaaatgctaaaattgcagattttggtctttctcggttgatgtcaactgctgctaattccaacgtgatagctacagctggagcattgggataccgggcacctgagctctcaaagctcaagaaagcaaacactaaaactgatatctacagtcttggtgttatcttgttagaactcctaacgaggaaatcacctggggtgtctatgaatggactagatttgcctcagtgggttgcctcagttgtcaaagaggagtggacaaatgaggtttttgatgcagacttgatgagagatgcatccacagttggcgacgagttgctaaacacgttgaagctcgctttgcactgtgttgatccttctccatcagcacgaccagaagttcatcaagttctccagcagctggaagagattagaccagagagatcagtcacagccagtcccggggacgatatcgtatag

SEQ ID NO: 561 - DNA, 2763 bp, Glycine max
  source 1..2763: mol_type = other DNA
atgtctctccccaaaaccctactttctctcttccttctcctcacgatccccctagtaaccgccgatgacgccgcggtgatgtcgaattttctcaaatccctcactccaccgccctcgggctggtctgaaacaaccccattctgccaatggaagggtatccaatgcgattcatccagccacgtgaccagcataagcctcgcttcgcattccctcaccggaacactcccctcggatctcaattccctctctcaactccgcactctctccctccaagacaattccctcaccggcaccctcccttctctctccaacctttctttcctccaaaccgtctacttaaaccgcaacaacttctcctccgtgtcccccaccgctttcgcctccctaacctccctccaaaccctcagcctcggctccaaccctgctctccaaccctggtccttccccaccgacctcacttcctcctctaacctaatcgacctcgacctcgccaccgtatccctcaccggtcccttgccggacattttcgacaaattcccttcccttcaacaccttcgcctctcttacaacaacctcaccggcaatttaccctcctctttctccgccgccaacaatctcgaaacgctctggctcaacaaccaggccgccggcttgtccggtaccctcctcgtcctctccaacatgtctgcattaaaccagtcctggctcaataagaaccagttcaccggttccataccggatttatcgcaatgcacggctttgtctgacttgcagctcagggataaccagttaactggtgtggttcccgcttcattgacaagtcttcctagtttgaagaaagtttctctggataataatgagcttcaggggcctgtgcccgtgtttgggaaaggtgtgaatgttactctcgatgggattaatagtttttgtcttgatactcctgggaattgtgatcccagggtgatggttttgctgcagattgccgaggcattcgggtatccaattcggttggcagagtcgtggaaggggaatgatccgtgtgatggttggaactatgttgtgtgtgctgccggaaagattattactgtcaatttcgagaaacagggtttgcagggtaccatctcccctgcatttgccaatttgactgacttgaggactttgtttctcaatggcaataatttgatcggttctatacctgatagtttgatcactttgcctcagcttcagactcttgatgtgtctgacaacaacctctctggattggttcctaagttcccaccaaaggtgaagttggtgactgcgggaaatgctttgcttgggaaaccccttagtcctggaggtggaccaagtggaactactccttctgggtcttcgaccggtggaagtggtggtgaatcctcaaagggtaattcttcggtgtcgccaggttggattgctggtatagttgttattgtgttgttttttattgcagtggtgttgtttgtgtcttggaagtgttttgtcaacaagctgcaggggaagttcagtagggttaaaggtcatgaaaatgggaaaggaggctttaaacttgatgctgtccatgtttctaatggatatggtggtgttccagttgagttgcaaagccagagcagtggtgatcgcagtgaccttcatgctttagatggtccaacattttctatccaagttcttcgacaagtgacgaataatttcagcgaggagaacattttaggcaggggagggtttggagtagtttataagggggtgttgcatgatggaacaaaaattgctgttaagaggatggaatctgttgcaatggggaacaaaggtcagaaagagttcgaagcagagattgcacttcttagtaaagttaggcatagacatttggttgctcttctagggtattgcatcaatggcaatgaaaggcttttggtgtatgagtatatgcctcaaggtacattaacacagcacctgtttgagtggcaggagcatgggtatgctcctttgacttggaagcaaagggtagtaatagctttggatgtagcgcggggggtggaatacttgcacagtttagctcagcaaagcttcattcatagagacttaaaaccctcaaacatactactaggcgatgacatgagagcaaaggttgctgattttgggttggttaaaaatgcaccagatgggaagtattctgttgagacacggttggctggaacatttggatatcttgcacctgagtatgcagctactggaagagtgacaaccaaagtggatgtttatgcatttggagtagttctgatggaacttatcaccggtagaaaggcattggatgatactgtgccagatgaaaggtctcacttggtgacatggttccgtagggtactaattaacaaggaaaacattccaaaggcaattgatcaaattctcaatccagatgaggaaaccatgggaagcatatatacagtggccgagctggcaggccattgcactgctcgcgaaccataccaaaggccggatatgggtcatgcagtgaacgtcttggttcctcttgtggagcaatggaaacctactagccatgatgaagaagaggaagacggctctggcggtgaccttcatatgagccttcctcaagctctacgaaggtggcaagccaacgaaggcacttcctcaatatttaatgacatttccatctcacaaacccaatcaagcatctcctctaaacctgcagggtttgcagactcctttgattcaatggattgccgttaa

SEQ ID NO: 562 - DNA, 405 bp, Zea mays
  source 1..405: mol_type = other DNA
atgcgcaaacatcgaatcgtctcactcgtggctgccctgctcatactgcttgccctcgccgtatcgtccaaccgcaacgcacaggaggattccatggccgacaacaccgggacgttggtgggcggcatccaggacgtgccggagaacgagaacgaccttcacctccaggagctcgcccgcttcgccgtcgatgagcacaacaagaaggccaatgctcttctggggttcgagaagcttgtgaaggccaagacacaagtggttgctggcacgatgtactatctcactattgaagtgaaggatggcgaagtcaagaagctctacgaagctaaggtctgggagaagccatgggagaagttcaaggagctgcaggaattcaagcctgttgaagagggtgctagcgcctaa

SEQ ID NO: 563 - DNA, 618 bp, Colocasia esculenta
  source 1..618: mol_type = other DNA
atggccttgatggggggcatcgtggatgtggagggagcgcagaacagcgccgaagtagaggagctcgcccgcttcgccgtcgacgaacacaataagaaggagaatgcgcttctgcagttctcccggcttgtgaaggcgaagcaacaggtggtttcgggcattatgcatcacctcactgtggaggttatcgaaggtggcaagaagaaagtgtatgaagccaaggtctgggtccaggcttggcttaactccaagaagcttcatgagttcagccccattggcgattcatcctcggttacgccagcagatctcggtgtaaaacgggatgcgcacgaagcggaatggctagagataccaacacatgatcctgtcgtccaagacgcagcaaaccatgcggtgaagagcatccagcaaagatccaatactttgttcccttatgaactgttggagatccttcatgcaaaggctaaggtgcttgaggacctcgccaaaatccatttgctactcaaacttaagaggggaagcagggaggagaagttcaaggtggaagtgcacaagaacattgaggggactttccatctgaatcagatggagcaagatcattcagactctggaaactag

SEQ ID NO: 564 - DNA, 1434 bp, synthetic construct
  source 1..1434: mol_type = other DNA
atggccatcgatagcaagactactttgcctaggcattcacttatccatacaatcaagctgaactctaacaagaagtatggtcctggtgacatgactaacggaaatcagttcatcatctcaaagcaggagtgggctactatcggagcctacatccagactggacttggattgccagtgaacgagcagcagttgaggacacatgttaacttgtctcaggatatctcaatccctagtgatttctctcagttgtatgacgtttactgttctgataagactagtgcagagtggtggaacaagaacttgtatcctttgatcatcaagtctgctaacgacatcgcttcatacggtttcaaggtggctggtgatccttctatcaagaaggatggatatttcaagaagttgcaggacgagcttgataacatcgttgataacaactctgatgacgacgcaatcgctaaggctatcaaggatttcaaggctagatgtggtatcttgatcaaggaagctaagcagtatgaggaagctgccaagaacatcgtgacatctctcgatcagttcttacatggtgatcagaagaagttagaaggtgttatcaacatccagaagaggttgaaggaagtgcagacagctcttaaccaggctcatggagagtctagtccagctcataaggagctcttggagaaagtgaagaacttgaagacaacattagagaggactatcaaggctgagcaggaccttgagaagaaagtggagtatagcttcttgttaggaccattgttgggattcgtggtttacgagatccttgagaacactgctgttcagcatatcaagaaccagatcgatgagatcaagaagcagttggattctgctcagcatgatttggacagggacgtgaagattatcggaatgttgaacagtatcaacacagatatcgacaacctttactctcaaggacaggaagcaatcaaggttttccagaagttgcaaggaatctgggctactatcggtgctcagatcgagaaccttaggacaacatcattgcaagaggttcaggactctgatgacgctgatgagatccagatcgaactcgaggacgcttctgacgcttggttggttgtggctcaggaggctagggatttcacacttaacgcttactcaactaactctaggcagaaccttccaatcaacgttatctcagattcatgtaactgttcaacaacaaacatgacatcaaaccaatacagcaatccaacaacaaacatgacatcaaaccagtacatgatctcacatgagtacacaagcttgccaaacaacttcatgttgtcaaggaactctaacttggaatacaagtgtcctgagaacaacttcatgatctattggtacaacaactctgactggtacaacaactctgattggtacaacaaccctccataa

SEQ ID NO: 565 - protein, 587 aa, Bacillus thuringiensis
KDQQLFNAIMDAVNKMVDNKFLSYNLSTLNKTIEGLQGNLGLFQNAIQVAICQGSTPERVNFDQNCTPCNPNQPCKDDLDRVASRFDTANSQFTQHLPEFKNPWSDENSTQEFKRTSVELTLPMYTTVATLHLLLYEGYIEFMTKWNFHNEQYLNNLKVELQQLIHSYSETVRTSFLQFLPTLNNRSKSSVNAYNRYVRNMTVNCLDIAATWPTFDTHNYHQGGKLDLTRIILSDTAGPIEEYTTGDKTSGPEHSNITPNNILDTPSPTYQHSFVSVDSIVYSRKELQQLDIATYSTNNSNNCHPYGLRLSYTDGSRYDYGDNQPDFTTSNNNYCHNSYTAPITLVNARHLYNAKGSLQNVESLVVSTVNGGSGSCICDAWINYLRPPQTSKNESRPDQKINVLYPITETVNKGTGGNLGVISAYVPMELVPENVIGDVNADTKLPLTQLKGFPFEKYGSEYNNRGISLVREWINGNNAVKLSNSQSVGIQITNQTKQKYEIRCRYASKGDNNVYFNVDLSENPFRNSISFGSTESSVVGVQGENGKYILKSITTVEIPAGSFYVHITNQGSSDLFLDRIEFVPKIQ

SEQ ID NO: 566 - protein, 1257 aa, Solanum lycopersicum
MEKRKDIEEANNSLVLFSALSKDIANVLIFLENEENQKALDKDQVEKLKLKMAFICTYVQLSYSDFEQFEDIMTRNRQEVENLLQSLLDDDVLTSLTSNMDDCISLYHRSYKSDAIMMDEQLDFLLLNLYHLSKHHAEKIFPGVTQYEVLQNVCGNIRDFHGLILNGCIKHEMVENVLPLFQLMAERVGHFLWEDQTDEDSRLSELDEDEHNDRDSRLFQLTHLLLKIVPTELEVMHICYTNLKASTSAEVGRFIKKLLETSPDILREYIIQLQEHMLTVIPPSTLGARNIHVMMEFLLLILSDMPKDFIHHDKLFDLLAHVGTLTREVSTLVRDLEEKLRNKEGNNQTNCATLDLLENIELLKKDLKHVYLKAPNSSQCCFPMSDGPLFMHLLHMHLNDLLDSNAYSISLIKEEIELVSQELEFIRSFFGDAAEQGLYKDIWARVLDVAYEAKDVIDSIIVRDNGLLHLIFSLPITIKKIKLIKEEISALDENIPKDRGLIVVNSPKKPVERKSLTTDKIIVGFEEETNLILRKLTSGPADLDVISITGMPGSGKTTLAYKVYNDKSVSRHFDLRAWCTVDQGYDDKKLLDTIFSQVSGSDSNLSENIDVADKLRKQLFGKRYLIVLDDVWDTTTLDELTRPFPEAKKGSRIILTTREKEVALHGKLNTDPLDLRLLRPDESWELLDKRTFGNESCPDELLDVGKEIAENCKGLPLVADLIAGVIAGREKKRSVWLEVQSSLSSFILNSEVEVMKVIELSYDHLPHHLKPCLLHFASWPKDTPLTIYLFTVYLGAEGFVEKTEMKGIEEVVKIYMDDLISSSLVICFNEIGDILNFQIHDLVHDFCLIKARKENLFDRIRSSAPSDLLPRQITIDYDEEEEHFGLNFVMFDSNKKRHSGKHLYSLRINGDQLDDSVSDAFHLRHLRLIRVLDLEPSLIMVNDSLLNEICMLNHLRYLRIRTQVKYLPFSFSNLWNLESLFVSNKGSILVLLPRILDLVKLRVLSVGACSFFDMDADESILIAKDTKLENLRILGELLISYSKDTMNIFKRFPNLQVLQFELKESWDYSTEQHWFPKLDCLTELETLCVGFKSSNTNHCGSSVVTNRPWDFHFPSNLKELLLYDFPLTSDSLSTIARLPNLENLSLYDTIIQGEEWNMGEEDTFENLKFLNLRLLTLSKWEVGEESFPNLEKLKLQECGKLEEIPPSFGDIYSLKFIKIVKSPQLEDSALKIKKYAEDMRGGNDLQILGQKNIPLFK

SEQ ID NO: 567 - protein, 912 aa, Glycine max
MAYAAVTSLMRTIHQSMELTGCDLQPFYEKLKSLRAILEKSCNIMGDHEGLTILEVEIIEVAYTTEDMVDSESRNVFLARNVGKRSRAMWGIFFVLEQALECIDSTVKQWMATSDSMKDLKPQTSSLVSLPEHDVEQPENIMVGRENEFEMMLDQLARGGRELEVVSIVGMGGIGKTTLAAKLYSDPYIMSRFDIRAKATVSQEYCVRNVLLGLLSLTSDEPDYQLADQLQKHLKGRRYLVVIDDIWTTEAWDDIKLCFPDCDNGSRILLTTRNVEVAEYASSGKPPHHMRLMNFDESWNLLHKKIFEKEGSYSPEFENIGKQIALKCGGLPLAITLIAGLLSKISKTLDEWQNVAENVRSVVSTDLEAKCMRVLALSYHHLPSHLKPCFLYFAIFAEDERIYVNKLVELWAVEGFLNEEEGKSIEEVAETCINELVDRSLISIHNVSFDGETQRCGMHDVTRELCLREARNMNFVNVIRGKSDQNSCAQSMQCSFKSRSRISIHNEEELVWCRNSEAHSIITLCIFKCVTLELSFKLVRVLDLGLTTCPIFPSGVLSLIHLRYLSLRFNPRLQQYRGSKEAVPSSIIDIPLSISSLCYLQTFKLYHPFPNCYPFILPSEILTMPQLRKLCMGWNYLRSHEPTENRLVLKSLQCLNELNPRYCTGSFLRLFPNLKKLEVFGVKEDFRNHKDLYDFRYLYQLEKLAFSTYYSSSACFLKNTAPLGSTPQDPLRFQMETLHLETHSRATAPPTDVPTFLLPPPDCFPQNLKSLTFSGDFFLAWKDLSIVGKLPKLEVLQLSHNAFKGEEWEVVEEGFPHLKFLFLDSIYIRYWRASSDHFPYLERLFLSDCFYLDSIPRDFADITTLALIDIFRCQQSVGNSAKQIQQDIQDNYGSSIEVHTRYLYRNGAFLVV

SEQ ID NO: 568 - protein, 854 aa, Glycine max
MVVAVEKTNLTSQSQCFNRVSDKKKERCKTHMNNVNPCCFLFLLCVWSLVVLPSCVRPVLCEDEGWDGVVVTASNLLALEAFKQELVDPEGFLRSWNDSGYGACSGGWVGIKCAKGQVIVIQLPWKGLRGRITDKIGQLQGLRKLSLHDNQIGGSIPSTLGLLPNLRGVQLFNNRLTGSIPLSLGFCPLLQSLDLSNNLLTGAIPYSLANSTKLYWLNLSFNSFSGPLPASLTHSFSLTFLSLQNNNLSGSLPNSWGGNSKNGFFRLQNLILDHNFFTGDVPASLGSLRELNEISLSHNKFSGAIPNEIGTLSRLKTLDISNNALNGNLPATLSNLSSLTLLNAENNLLDNQIPQSLGRLRNLSVLILSRNQFSGHIPSSIANISSLRQLDLSLNNFSGEIPVSFDSQRSLNLFNVSYNSLSGSVPPLLAKKFNSSSFVGNIQLCGYSPSTPCLSQAPSQGVIAPPPEVSKHHHHRKLSTKDIILIVAGVLLVVLIILCCVLLFCLIRKRSTSKAGNGQATEGRAATMRTEKGVPPVAGGDVEAGGEAGGKLVHFDGPMAFTADDLLCATAEIMGKSTYGTVYKAILEDGSQVAVKRLREKITKGHREFESEVSVLGKIRHPNVLALRAYYLGPKGEKLLVFDYMSKGSLASFLHGGGTETFIDWPTRMKIAQDLARGLFCLHSQENIIHGNLTSSNVLLDENTNAKIADFGLSRLMSTAANSNVIATAGALGYRAPELSKLKKANTKTDIYSLGVILLELLTRKSPGVSMNGLDLPQWVASVVKEEWTNEVFDADLMRDASTVGDELLNTLKLALHCVDPSPSARPEVHQVLQQLEEIRPERSVTASPGDDIV

SEQ ID NO: 569 - protein, 920 aa, Glycine max
MSLPKTLLSLFLLLTIPLVTADDAAVMSNFLKSLTPPPSGWSETTPFCQWKGIQCDSSSHVTSISLASHSLTGTLPSDLNSLSQLRTLSLQDNSLTGTLPSLSNLSFLQTVYLNRNNFSSVSPTAFASLTSLQTLSLGSNPALQPWSFPTDLTSSSNLIDLDLATVSLTGPLPDIFDKFPSLQHLRLSYNNLTGNLPSSFSAANNLETLWLNNQAAGLSGTLLVLSNMSALNQSWLNKNQFTGSIPDLSQCTALSDLQLRDNQLTGVVPASLTSLPSLKKVSLDNNELQGPVPVFGKGVNVTLDGINSFCLDTPGNCDPRVMVLLQIAEAFGYPIRLAESWKGNDPCDGWNYVVCAAGKIITVNFEKQGLQGTISPAFANLTDLRTLFLNGNNLIGSIPDSLITLPQLQTLDVSDNNLSGLVPKFPPKVKLVTAGNALLGKPLSPGGGPSGTTPSGSSTGGSGGESSKGNSSVSPGWIAGIVVIVLFFIAVVLFVSWKCFVNKLQGKFSRVKGHENGKGGFKLDAVHVSNGYGGVPVELQSQSSGDRSDLHALDGPTFSIQVLRQVTNNFSEENILGRGGFGVVYKGVLHDGTKIAVKRMESVAMGNKGQKEFEAEIALLSKVRHRHLVALLGYCINGNERLLVYEYMPQGTLTQHLFEWQEHGYAPLTWKQRVVIALDVARGVEYLHSLAQQSFIHRDLKPSNILLGDDMRAKVADFGLVKNAPDGKYSVETRLAGTFGYLAPEYAATGRVTTKVDVYAFGVVLMELITGRKALDDTVPDERSHLVTWFRRVLINKENIPKAIDQILNPDEETMGSIYTVAELAGHCTAREPYQRPDMGHAVNVLVPLVEQWKPTSHDEEEEDGSGGDLHMSLPQALRRWQANEGTSSIFNDISISQTQSSISSKPAGFADSFDSMDCR

SEQ ID NO: 570 - protein, 134 aa, Zea mays
MRKHRIVSLVAALLILLALAVSSNRNAQEDSMADNTGTLVGGIQDVPENENDLHLQELARFAVDEHNKKANALLGFEKLVKAKTQVVAGTMYYLTIEVKDGEVKKLYEAKVWEKPWEKFKELQEFKPVEEGASA

SEQ ID NO: 571 - protein, 205 aa, Colocasia esculenta
MALMGGIVDVEGAQNSAEVEELARFAVDEHNKKENALLQFSRLVKAKQQVVSGIMHHLTVEVIEGGKKKVYEAKVWVQAWLNSKKLHEFSPIGDSSSVTPADLGVKRDAHEAEWLEIPTHDPVVQDAANHAVKSIQQRSNTLFPYELLEILHAKAKVLEDLAKIHLLLKLKRGSREEKFKVEVHKNIEGTFHLNQMEQDHSDSGN

SEQ ID NO: 572 - protein, 475 aa, Bacillus thuringiensis
MIIDSKTTLPRHSLIHTIKLNSNKKYGPGDMTNGNQFIISKQEWATIGAYIQTGLGLPVNEQQLRTHVNLSQDISIPSDFSQLYDVYCSDKTSAEWWNKNLYPLIIKSANDIASYGFKVAGDPSIKKDGYFKKLQDELDNIVDNNSDDDAIAKAIKDFKARCGILIKEAKQYEEAAKNIVTSLDQFLHGDQKKLEGVINIQKRLKEVQTALNQAHGESSPAHKELLEKVKNLKTTLERTIKAEQDLEKKVEYSFLLGPLLGFVVYEILENTAVQHIKNQIDEIKKQLDSAQHDLDRDVKIIGMLNSINTDIDNLYSQGQEAIKVFQKLQGIWATIGAQIENLRTTSLQEVQDSDDADEIQIELEDASDAWLVVAQEARDFTLNAYSTNSRQNLPINVISDSCNCSTTNMTSNQYSNPTTNMTSNQYMISHEYTSLPNNFMLSRNSNLEYKCPESNFMIYWYNNSDWYNNSDWYNN

SEQ ID NO: 573 - DNA, 1000 bp, Pseudomonas syringae
  source 1..1000: mol_type = other DNA
atgaacaagcgctacggcaacaacttgccgggatcctgttgcgcgctgagcaaccggatcgactggacgtcaccttcgcgcagcacgccatctggcaaaaaggccgccgttaatcgtttccaatatttctgcaggagtctgcccgtgaccaccttcaccgtgcccctgattctgtcggatgcaagccccacggcactcgccgctaccgcgcaacgtctgcgcgccgagcacgagacgcgctccttcgccgctgatgactgacatcaccgtgcccttccagctcggaatgcacttcgtcttcccagctttcctgatacggctgacgatacattttgcggaagtgattgcggatcaggttcagcgcgatgccacacagccaggtctgcggtttgctggcatgttgaaacttgtgctcgttacgcagggcttcaagaaacacgcactggagaatgtcatccacatcatcagggttcatcacccgcttttggataaacgccctgcagggcgtttatccaaaagcgggtgatgaaccctgatgatgtggatgacattctccagtgcgtgtttcttgaagccctgcgtaacgagcacaagtttcaacatgccagcaaaccgcagacctggctgtgtggcatcgcgctgaacctgatccgcaatcacttccgcaaaatgtatcgtcagccgtatcaggaaagctgggaagacgaagtgcattccgagctggaagggcacggtgatgtcagtcatcagcggcgaaggagcgcgtctcgtgctcggcgcgcagacgttgcgcggtagcggcgagtgccgtggggcttgcatccgacagaatcaggggcacggtgaaggtggtcacgggcagactcctgcagaaatattggaaacgattaacggcggcctttttgccagatggcgtgctgcgcgaaggtgacgtccagtcgatccggttgctcagcgcgcaacaggatcccggcaagttgttgccgtagcgcttgttcat

SEQ ID NO: 574 - DNA, 1313 bp, Arabidopsis thaliana
  source 1..1313: mol_type = other DNA
atggcctctctattctcttcagttctcttgtctctttgtttactctcttcactttttctctcaaatgcaaacgctaagccaaaactaggcttcaccgcggatctaatccaccgtgattctcctaaatcgccgttctataacccgatggaaacctcttcccagcgtctacgaaacgcgatccaccgatccgttaaccgtgttttccatttcactgaaaaggataacacaccacaaccacagattgacctcacctcaaatagcggtgaatatctcatgaacgtatccattggaacacctcctttcccgatcatggccatcgccgacaccggaagtgatctcctctggacgcagtgcgcaccatgcgatgattgttacactcaagttgatcctctctttgaccctaaaacgtcttccacatacaaagacgtttcttgctcctcaagtcaatgtactgccctagaaaatcaagcctcttgttccacaaatgacaacacttgttcttactcattgtcttacggggataactcatacacaaagggtaacatcgccgtggataccttaacgctcggctccagcgatacccgccctatgcagcttaagaatattattatcggttgtggtcacaacaacgctggaacgtttaacaagaaaggctctggaatcgtcggactaggtggtggtccggtttcgcttatcaagcaacttggcgactccatcgacggtaaattctcatactgcttggttcctctaacttccaaaaaggatcaaacgagtaaaatcaacttcggaaccaatgccatcgtgtcgggatcaggagttgtctcaactcctctgatcgcaaaggcgtctcaagagaccttctattacctaaccctaaaatccattagcgtgggaagcaagcaaatccaatactcaggctcagattctgaaagcagcgagggaaacatcatcatcgattcaggcacaactttaacgttattaccgactgaattttactccgagctcgaggatgcggttgcatcctctatcgatgctgagaagaagcaagatccacaaagcggtttgagtctatgttacagtgcaaccggagatctaaaagttccagtcattactatgcattttgatggagccgatgtgaagcttgactcctccaatgcctttgtacaagtctcggaggatttggtttgctttgccttccgcggaagcccgagtttctccatatacggtaatgtggcgcagatgaactttcttgttggatacgacactgtttccaaaacggtgtcatttagccaacagattgtgcaaagatgtag

SEQ ID NO: 575 - DNA, 1771 bp, Poncirus trifoliata
  source 1..1771: mol_type = other DNA
ttgagaggaatatatattgtagctgttggcgactaatagatgattgttaattattaatgaatcagatattgtgttttgtgttagatttagtgattgatgatcttttcagtgacacagcgacacaaataacatcaaatatgttaatttatagttttataccatatcgattcaaaaccaaatacagtaaaacgaactaatcgttcgtaggatgatacaatcttgcgaaatacaaaatttaattactgcttggtgcagtcagtcggtctaaatgacactgtttgttgttctatgtcatagccgactaaaaagttagtctgcattatattaccataaagttgcagactattggtggtacctttaaaaacagaacatacaatatccttcgaaaccttcacaaaaaagttggaacgactcaatttcacatctgcacctctgaaatgtattgtaacttcaggaacttgagatagtgaattaaaactgtagcaaagttcaaatgatcctttggggtctgcaacaggttgtgcctcaatcatactggacattactgacaacaattttgagttataaccttgtggcaataaggtaaatgttgtaccagaatcgattacaatgtctcttcctggagtcgatccagacataacttctagtctttggtttcctacactgattgcatcaattgtgagaacataagaggttttggctttagtcaagggagtagaaaccactcctgggcctgaaacaattccattggttccaaaattgattttggttgaggttgctggaaccaaacaataggagaatttaccagcaattgtagttcgcatttgagaaataagtgaaatatcgccgcctccaaggccaacaattccggttgtttttgaattaaacaagccaccattgtttgttccgcaaccaaaggttattccaggcagagccacggcctgtcctgttgttgaacccaaagtaacagtttcggtagcaagattgccatttgagaaggatccatctccataagagaccgagtattgacaatttaccccagagcaagatttttggctaagagatgcacattggcttgaggagcatggaagagatttgtaagtagatgactttttaggatcaaaaagtggagagtcctgcatgtaacattttgatggtgggcaaggctcgcactgcgtccatatgaggtcacttcctgtatcagcaacagctagtatttcagtagcgggagtaccaattgatatacgtatgagatattctcccctattgggtattatatcagcttgggaagcggctgatgaagatattgatgagttctgattaaagtgattaagacgattgagagaacgagtcaaagcatttctcaatcgttggtagggagtttcactggagttgtaaaagggagacttgggagagtcacggtggattagctcaacactgaaacctccagtttgagcttctattggagagacaacataaaaacaaagaaagaagagaatgaatgcacaactcaagaaggttgccataatcaaagctgtgattgaggtaataagaaagtggcaacgagtctatgcttatatagaggaggacacagagagataagttgcaaaatttaattaattttgaatagaagaccaaaaaaaaaaaaaaaaggaaagaaaatgagcttccaagaaaatgaaactttcttgtgtagtaagcttttgttatagtgacaattatcttatgggagggcctaagttacgttyaacgtaayttaygccctctcaca

SEQ ID NO: 576 - DNA, 1426 bp, Poncirus trifoliata
  source 1..1426: mol_type = other DNA
atggcaaccttcttgagttgtgcattcattctcttctttttttttttttatgttgtctctccaatagaagctcaaactggaggtttcagtgttgagctaatccaccgtgactctcccaagtctcccttttacaactccagtgaaactccctaccaacgattgagaaatgcttttactcgttctaccaatcgtcccaatcactttaatcagaactcatcaatatcttcatcaaaagcttcccaagctgatataatacccaatatgggagactatctcatacgtatatcaattggtactcccgcgactgaaatactagcagttgctgatacaggaagtgacctcatatggacgcagtgcgagccttgcccaccatcacaatgttacatgcaggactctccacttttttatcctaaaaagtcatctacttacaaatctcttccatgctcctcaagccaatgtgcatctcttagccaaaaatcttgctctggggtaaattgtcaatactcggtctcttatggagatggatccttctcaaatggcaatcttgctaccgaaactgttactttgggttcaacaacaggacaggccgtggctctgcctggaataacctttggttgcggaacaaacaatggtggcttgtttaattcaaaaacaaccggaattgttggccttggaggcggcggtatttcacttatttctcaaatgcgaactacaattgctggtaaattctcctattgtttggttcaggcaagctcaaccaaaatcaattttggaaccaatggaattgtttcaggtccaggagtggtttctactcccttgattgttaaatccaaaaccttttatgctctcacaattgatgcaatcagtgtaggaaaccaaagactagaagttatgtctggatcgactccaggaggagacattgtaatcgattctggtacaacacttaccttattgccacaacgttataactcaaaattgttgtcagtaatgtccagtatgattgaggcacaacctgttgcagaccctaaaggatcacttgaactttgctacagttttaattcactatctcaagttcctgaagttacaatacatttcagaggtgcagatgtgaaattgagtccttccaacttttttgtgaaggtttcgaaggatattgtatgttctgtttttaaaggtaccaatmgtctgccactttatggtaatataatgcagactaactttttggtcggctatgacatagaacaaggaacagtgtcatttaaaccgactgattgcaccaagcaataattaattgggaagcttaatcgatattctccactctactagagtttgatcgagtgattttcaaaccactttctttagcagatcaaccgatttcaaattctaatgcgattggagctgaataaaatctatttaaataaatgta

SEQ ID NO: 577 - DNA, 192 bp, Hyalophora cecropia
  source 1..192: mol_type = other DNA
atgaatttcgcaaagatcctatccttcgtcttcgctctggtgctggctttgagcatgaccagcgctgctcccgagcccaggtggaagatcttcaagaaaattgaaaaaatgggcaggaacatccgtgatggcatcgtcaaagcgggcccggcgatcgaggtcctcggttcggctaaagctataggaaaatga

SEQ ID NO: 578 - DNA, 33 bp, synthetic construct
  source 1..33: mol_type = other DNA
aaaaaactgtttaaaaaaattctgaaatatctg

SEQ ID NO: 579 - DNA, 45 bp, synthetic construct
  source 1..45: mol_type = other DNA
aaatggaaactgtttaaaaaaattggcgcggtgctgaaagtgctg

SEQ ID NO: 580 - DNA, 219 bp, Medicago truncatula
  source 1..219: mol_type = other DNA
atggagaagaaatcactagcaggcttatgcttcctcttcctcgttctctttgttgcacaagaaattgtggtgactgaagctaagacttgtgagaatttggctgataaatacaggggaccatgctttagtggttgtgatactcactgcactaccaaagagaatgcagttagcggcaggtgcagggatgactttcgttgttggtgtactaaaagatgttaa

SEQ ID NO: 581 - DNA, 495 bp, Raphanus sativus
  source 1..495: mol_type = other DNA
atggagaagaaatcactagctggcttgtgcttcctcttcctcgttctctttgttgcacaagaaattgtggtgactgaagccaaaacttgtgagaatttggctgataaatacaggggaccatgcttcagtggctgtgacactcattgcacaaccaaagaacacgcagttagcggcaggtgcagggatgactttcgctgctggtgtactaaaagatgtagcaacgcagcagacgaggtggcgacgccacaagacatggctaagtttgcttctatcattgtccttctcttcgttgctcttgtcgtttttgctgctttcgaagaaccaacaatggtggaagcacagaagttgtgtcagaggccaagtgggacatggtcaggagtctgtggaaataataacgcatgcaagaatcagtgcattcgacttgagaaagcacgacatgggtcttgcaactatgtcttcccagctcacaagtgtatctgttatttcccttgttaa

SEQ ID NO: 582 - DNA, 243 bp, Arabidopsis thaliana
  source 1..243: mol_type = other DNA
atggctaagtctgctaccatcgttactcttttcttcgctgctcttgttttctttgctgctcttgaagcaccgatggtggtggaagcacagaagttgtgcgagaggccaagtgggacatggtccggagtttgcggaaacagtaacgcgtgcaagaatcagtgcattaaccttgagaaagcacgacatggatcttgcaactatgtcttcccagctcacaaatgtatctgctacttcccatgttaa

SEQ ID NO: 583 - DNA, 24 bp, Brassica oleracea
  source 1..24: mol_type = other DNA
ttttggcagaaaatgagctttgcg

SEQ ID NO: 584 - DNA, 21 bp, Photorhabdus sp.
  source 1..21: mol_type = other DNA
tggaactggagcaaaagcttt

SEQ ID NO: 585 - DNA, 30 bp, Urechis unicinctus
  source 1..30: mol_type = other DNA
gcggcgggcatgggcttttttggcgcgcgc

SEQ ID NO: 586 - protein, 437 aa, Arabidopsis thaliana
MASLFSSVLLSLCLLSSLFLSNANAKPKLGFTADLIHRDSPKSPFYNPMETSSQRLRNAIHRSVNRVFHFTEKDNTPQPQIDLTSNSGEYLMNVSIGTPPFPIMAIADTGSDLLWTQCAPCDDCYTQVDPLFDPKTSSTYKDVSCSSSQCTALENQASCSTNDNTCSYSLSYGDNSYTKGNIAVDTLTLGSSDTRPMQLKNIIIGCGHNNAGTFNKKGSGIVGLGGGPVSLIKQLGDSIDGKFSYCLVPLTSKKDQTSKINFGTNAIVSGSGVVSTPLIAKASQETFYYLTLKSISVGSKQIQYSGSDSESSEGNIIIDSGTTLTLLPTEFYSELEDAVASSIDAEKKQDPQSGLSLCYSATGDLKVPVITMHFDGADVKLDSSNAFVQVSEDLVCFAFRGSPSFSIYGNVAQMNFLVGYDTVSKTVSFKPTDCAKM

SEQ ID NO: 587 - protein, 63 aa, Hyalophora cecropia
MNFAKILSFVFALVLALSMTSAAPEPRWKIFKKIEKMGRNIRDGIVKAGPAIEVLGSAKAIGK

SEQ ID NO: 588 - protein, 11 aa, synthetic construct
KKLFKKILKYL

SEQ ID NO: 589 - protein, 15 aa, synthetic construct
KWKLFKKIGAVLKVL

SEQ ID NO: 590 - protein, 72 aa, Medicago truncatula
MEKKSLAGLCFLFLVLFVAQEIVVTEAKTCENLADKYRGPCFSGCDTHCTTKENAVSGRCRDDFRCWCTKRC

SEQ ID NO: 591 - protein, 164 aa, Raphanus sativus
MEKKSLAGLCFLFLVLFVAQEIVVTEAKTCENLADKYRGPCFSGCDTHCTTKEHAVSGRCRDDFRCWCTKRCSNAADEVATPQDMAKFASIIVLLFVALVVFAAFEEPTMVEAQKLCQRPSGTWSGVCGNNNACKNQCIRLEKARHGSCNYVFPAHKCICYFPC

SEQ ID NO: 592 - protein, 80 aa, Arabidopsis thaliana
MAKSATIVTLFFAALVFFAALEAPMVVEAQKLCERPSGTWSGVCGNSNACKNQCINLEKARHGSCNYVFPAHKCICYFPC

SEQ ID NO: 593 - protein, 8 aa, Brassica oleracea
FWQKMSFA

SEQ ID NO: 594 - protein, 7 aa, Photorhabdus sp.
WNWSKSF

SEQ ID NO: 595 - protein, 10 aa, Urechis unicinctus
AAGMGFFGAR

SEQ ID NO: 596 - DNA, 6393 bp, Tomato brown rugose fruit virus
  source 1..6393: mol_type = other DNA
gtatttttgttttacaacatataccaacaacaacaaacaacaaacaacaacattacaattactatttacaactacaatggcatacacacagacagctaccacatccgctttgctcgacactgtccgaggtaacaataccttggtcaacgatcttgcgaagcggcgtctttatgacacagcggtcgacgagttcaacgctcgtgatcgcaggcccaaagtaaatttttccaaagtaataagtgaggaacagacgcttattgctactagggcatatccagaattccagataaccttctataatacgcagaacgccgtgcattcgcttgccggtggactacgatccttagaactggaatatctaatgatgcagatcccgtacggatcactcacatatgatataggtgggaattttgcatctcatctgttcaaaggacgggcatatgttcactgctgtatgcccaatcttgatgtccgcgacataatgcggcacgaaggccagaaagacagtatagaattatacctttccaggcttgagcggggcaacaaagttgtcccaaatttccaaaaggaagcttttgacagatacgctgaaacgccagacgaagttgtctgtcacagtaccttccaaacgtgtacgcaccagcaggtggaaaacacaggcagggtgtatgctattgcattgcacagtatatacgatatacctgctgatgaattcggagcggcacttttaaggaaaaatgtccatgtttgttacgccgccttccacttttccgagaatttacttctcgaagattcacacgtcaaccttgacgaaatcaacgcgtgtttttcgcgtgatggagacaagctgactttttctttcgcatctgagagcactttaaattattgtcatagttattctaatattttaaaatacgtgtgcaaaacttacttcccggcatctaatagagaggtctacatgaaggagtttttggtcaccagggttaacacctggttttgtaagttttctaggatagatacttttttattatacaagggggtagcccacaaaggtgtaaatagtgagcaattttacagcgcaatggaagatgcatggcactacaaaaagactcttgcaatgtgtaacagcgagaggattcttcttgaagattcctcatcggtcaattactggttcccaaaaatgagagatatggtcatagttcctctattcgacatatctctcgacaccagtaaaaggacccgcaaagaagtcttagtgtcaaaggattttgtattcacagttttaaatcacattcgcacttatcaagccaaggcacttacatactccaatgttttatcctttgtcgaatcaattcgttcaagggtaattatcaacggagtgactgccaggtctgagtgggatgttgacaaatctcttttgcaatccttgtccatgacatttttcttgcatactaagcttgccgttttaaaagacgaattgttaatcagcaagtttagtttggggccaaaatcagtaagccagcatgtatgggatgagatttccctggcttttggaaacgcatttccatcgatcaaggagagactgctaaatcggaaactaattaaagtgtcgggagacgcattagaaatcagggtgcctgatttatatgtgacttttcacgatagattagtgactgagtacaaaacatcggtggatatgccagtgcttgatatcagaaagagaatggaggagactgaggttatgtacaatgcattgtctgagctatctgtgctcaaggagtcggacaagttcgacgttgatgttttttcccggatgtgccagactttggaggtagacccaatgactgcagcaaaggttattgtggcagtgatgagcaacgagagcggactgactcttacattcgaacagccaactgaagcaaatgtcgcattggcacttaaagattcagaaaaagcctctgagggtgcactagtggttacttctagagatgttgaagaaccatccatgaagggttcaatggcaagaggagagttacaattggccggtctgtctggagaccaaccagagtcttcctatactcggaacgaggaaatagagtcattagagcaattccacatggcaacggctagttcgttaattcggaaacagatgagttcgattgtgtacacgggccccattaaagttcagcaaatgaaaaactttattgatagcctggtagcatcactctctgctgcggtgtcgaacctagtcaagatcctaaaggatacagctgctatagatctcgaaacccgtcagaagtttggagtcttagatgttgcgaccaaaagatggttaattaaacctttagccaagaatcacgcatggggcgttattgaaacacatgctaggaagtaccacgttgcacttttggagtatgatgagcatggagtggtaacttgcgacagttggagaagggtggccgtgagttctgagtcaatggtttattctgatatggcaaagctcagaacactgaggagattattaagagatggtgagcctcatgtcagcagtgctaaagtcgtcctagttgacggtgtcccgggttgtggaaagacaaaagagattctctcgaaagtaaattttgaggaagatctaatcttagtaccgggtaagcaggctgctgaaatgataaagaggcgtgctaatgcgtcaggaataattcaagccacaagagataatgttcgtactgttgattcatttataatgaattacggtaaaggaacacgctgtcagttcaaaaggttatttatcgacgaaggtctgatgttgcacactggttgtgtgaattttcttgtttctatgtctctgtgcgaaattgcatatgtttatggagacacacaacaaattccatacatcaacagagtatccggttttccgtaccctgcacattttgcaaaaatagaggttgatgaggtggaaactcgcagaactacgctgcgttgtccagccgacattacccactatcttaacagaaggtacgaaggatatgtcatgtgtacatcgtcggttaaaaagtcagtttctcaggaaatggtgagcggggccgcaatgatcaatcctgtatctaagccattgaatgggaaagttttgactttcactcagtctgataaagaggcgctgctttctcgaggatatacggacgtccatacagtacatgaggtacaaggtgagacatatgcagatgtgtcgttggtcagattgactccgacacctgtatctatcatcgcaggagatagtccgcacgttctcgtagctttgtcaaggcatacccaaacattgaagtattacaccgtagtgatggatcctcttgtaagtataattagggatttagaaaaacttagttcttacttgttagatatgtataaagtagatgcagggacccaatagcaattacaggtagactccgtgtttaaaggttctaatctttttgttgcagcaccaaagactggagatatctcagatatgcaattttactatgataagtgtctcccaggtaatagcaccatgttaaataactatgatgctgttaccatgaggttgactgacatttctcttaatgtcaaagattgcatattggatttctctaagtctgtggctgcaccgaaggatccgatcaaaccactgattccgatggtacgaacggcggcagaaatgccacgccagactggactattggaaaatttggtggcgatgatcaaaagaaactttaattcaccggagttatcaggaataatcgacattgagaatactgcatctttagtagtagataaattttttgatagttacttgcttaaagaaaaaagaaaaccaaataaaaatgtttctttattttgtagagagtctctcaatagatggttagagaagcaggagcaagtgaccattggtcagcttgcagattttgattttgtggatcttcctgccgttgatcagtacaggcatatgattaaagcgcaacctaagcagaagctggatacatcaattcaaagcgaatatccggccttgcagacgattgtgtatcattcgaaaaagatcaacgcaatcttcggtcctttgttcagtgagctcacaaggcaaatgctcgaaagcatagactcaagtaagtttttgttctttacaaggaagacgccagctcaaattgaggatttcttcggagatctcgatagccatgtccctatggatatcttggagttggatatttcgaagtatgacaaatctcagaacgagttccactgtgcagtagagtatgaaatatggagaagacttggattagaagattttctgggagaagtttggaaacaaggccacaggaaaactactcttaaagattacacagctggtattaaaacgtgtttatggtaccagagaaagagtggggacgttacaacattcatcggtaatacggtgattattgctgcttgtttagcttccatgttgcccatggagaaaataatcaaaggtgcattttgcggagatgacagtttactatacttcccaaaaggttgtgagtttcctgacatacagcatacagccaaccttatgtggaatttcgaggctaagctattcagaaagcagtatggttatttctgtggaaggtacgtgatacatcatgacagagggtgtattgtttattatgaccctttgaagttgatttctaaacttggtgctaaacacatcaaggattgggatcacttagaagagttcagaagatccctttgtgatgttgcaaattcgttgaacaactgtgcgtattacacgcagttggacgacgctgtgagtgaggtccataaaaccgcacccccgggttcgtttgtatataaaagtttagttaaatatctgtccgataaggttctttttagaagtttgtttatagatggctcttgttaagggtaaagtcaatattaatgagttcatagacttgtcaaaatcagaaaaatttcttccgtctatgttcacacctgttaagagtgtcatgatctccaaggttgataagatattggttcatgaagatgaatctttgtccgaagtcaatttactcaaaggtgtaaaactcattgatggtggctatgtacatcttgctggtcttgtggtgacaggtgaatggaatttgccagataattgtcgtggtggtgtcagtgtctgtttggtcgataagagaatggagagagcggacgaggcaactcttgcttcatactataccgcagcggctaagaaaaggtttcagttcaaagtcgttccaaattacaacatcactaccaaggacgcagaaaaggcagtttggcaagtactagttaatattagaaatgttaaaattgctgcgggttactgtccgctgtcattagaatttgtgtcagtgtgtattgtttataaaaatattataaaactcggtttgagagagaaaattacgagcgtcacggatggagggcccatggaactatcagaagaagttgttgatgagttcatggaagaagtcccgatgtctgtaaggcttgcaaaatttcgttcgaagaccggaaaaaagtttagtagtaaaagtgagaataatagtggtaataataggccgaaaccagacaaaaaccaaaggaaggaaaagggtttaaaagttagggttgagaaggataatttaattgataatgaattggagacttacgtcgccgattcagattcgtattaaatatgtcttacacaatcgcaactccatcgcaatttgtgtttttgtcatcagcatgggccgaccctatagaattaataaatttatgtactaattcactaggtaatcagttccaaacacaacaagctagaacaaccgttcaacggcaatttagcgaagtgtggaaacctgtccctcaagtcactgttaggtttcctgacagtggttttaaggtgtataggtacaatgcggtactagatcctctagttactgctttgttaggagctttcgatactagaaataggattatagaagtcgaaaatcaggcgaacccgacaaccgccgaaacgttagacgctactcgtagagtagatgacgcaacggtggctataaggagcgctataaataatttagtagtagaattggtcaaaggaacaggtttgtacaatcagagcacatttgaaagtgcatccggtttacaatggtcctctgcacctgcatcttgagataatcgagatgcttaaataacagattgtgtctgcaaacacacgtggtacgtacgataacgtatagtgtttttccctccacttaaatcgaagggtagtgtcttggagcgcgcgggacaaatgtgtatggttcatacacatccgtaggcacgtaataaagcgagggattcgaattcccccggaacccccggaggggccca

SEQ ID NO: 597 - DNA, 11519 bp, Celery latent virus
  source 1..11519: mol_type = other DNA
aaaatttaaatttatgagcaagagaatatatacgattattgttgttttgtgctttcaggtttgctttcaaaatctccgaacacagcctacacaatcttcacataccttctcaacaaatccggcgatccccggtaccgacgctcttcaatttgaagaaaacgcaaacttaacttactctaccataaaatacaatattttaaagtttaatttaaattacaaacaatcaatcatgtctgtggtctctttcgggtcaatcacgagcatggacttcgatgctgcatgtctagcagctatgatcgaaacccctggtggctctattccaccaactccacaatcaccacccacttcaccagtggcggtgaaacaaaggaaaattttaaattttccaattgccaaaatcaggacaactcctgatgcatcttttgagatgtgtgtgaagttccccgagagcttcattgattccttctgtgctcaagcacagaaagaattaaaatattggcacgctgctattacgcagttgaaattctttggtggtgagacaccaaagactcttgaaaccttggtgaaccaaggtcaagctcacactcaccaagttattttaaacttggttaaaatccttgatagtgctccaaaagcaattcaaggaaagaaggagttggaaaatttcttccagctgagcccacatggaaacaattccaaagaaccaattgacgttagtcgaaaggtttatatggaaccgtgcaaaataagtccacgcaagcgacaagtgtgctcctgtgacaatgacgatgatgcacattatcattgttactattgtgatattgtgtgttcaagcaaaaatctattgcaagaacacgaaagggatttttgcgaggatgcacagtcagtgcaagcatttgggtataaacttgagagtccaaatgtctttgacccaccccatgtgacgcagcaaaggagtgttgcaccatctttgggaaaaactttggaatctcctgtgaaatctccagagcagtcaaagccaaacctggagaaaagtttcccactagtggaatcttccaccaacagtggcatgatcttctttggatcaatagctaccatggttccgtctcatattgaaaaatatgtgaggaattgtgaaactgagaatccgattgatgcagctgcatcaaatttggcgatgcaagaagctaaaagctctggcgctccttgtatagtagtgcatcataaggcactaccaggtggaaagaaagattttctttttcctcataactctcctcaagttgtgagaactgaaaccgaagagccaattgctggtaccattgatagaccaacaataaaacgtgctttatttacccgcattaagaagaaagcacaagaaatttgtgtgaacccagggggaaccatccagagaaaaacaaagcgatggttgcggccagcggaagttgcacaaattgtgcgagctacctctgatccacaacatccattgttcaaggtggacgttactcaaattattgaagttgttcatcctgtttataggactgaaagaactgaagttgtgcagcaatgcataacaaggggaacgtacaaattgatgtctaaagcccaacaacggaaggcacgagcaatgcgctcagctggaatgttagtgatcactgataacccaacaacgcattgggtatctgaacctcagaaaatgctagtggtaaaggaaaaactgagcacaacaaagcatgtgaaactccggaatgttgaagtgaatgctgaatctgaaatgttttggggaactaaaacaaaggagggaccctcgaaaacagccttaaagcgctgtaagcgtaacatcgatcgcttggctcttcttgatccgcaaatgggtgagtctgcgaatggtgaatgttggatgaacacctttaagcaccatttaaaagtggggagcattgatattcttccaaataaggttcgtttaccaaaccttaggtcggcattctcacgatggatacctttggttgattatgttgaaattttgaaatttcattgtaagtcacaaccaaagcttaaaagggttgtgatacctactccagttacttatctggaaggttctagatatcacattcatgttggttatagcaagaactgctcatggattacggtcgaacaactaattaggcaattgcagactctgttaacatcatccaaatatggagaacattttaagagagcaattgttggtggtgaaccggaagacaaattcacaccagtggttcctatagttgacgtggaaactgagagagctaaatctagcttggcaaaatggacaactgcgcaacagagatatatgggatctattagaacccgaatcaactcacaagcagaaaaacataaaatcgattcggaaaaaaagatctggataccaatgaggcacgacacgatggatatgttaactccaccatatcttttcgaaaatgggctgagaaacaacgaagttcaacaagtcggccaggttcttggagattctgtagatcgtgctggaaacagttcaggtcagagttctcaatgccaacaacaaaatgtggcgcttgcatccgaaggaaacaacgacaacgtgataaacgagagcgtgcgcagcattcaaaacttagttactgccaatatgcagttgcaagagcaatgcaaattgttgctcgcctcacacgaacaagctatcatggactccgtagaacacggaaacttggagattcagaagcacgatgtagaggtctcgcagaaaccatcaacgaggaaaagcgactcacagaggaatttgcaaaaattctcattgaagaaaatagtcgcctcagaagagatgtcgagaacattgggcagaggatggagaaaatctgtcacctcaatcggtgttccaattgtgagtgcttccattgcagaagctttaaatcaagtcgttcaaaggggaaatacttcctggcttgatgtaggcatttctggaacattgttgaagcaatgtactctttttgctacgagaacttttcaagcgtattgtagctacaaattagcacgaaacgtgctgacattaaccgtgggagaattgtatgataatgtgaaatcatacatcaactctataatgggttccacagatcctgaagtgactggtttcttgtcgcaagtacgtagcgcaccttcaatggtgaagatggccattttgctcacaatgtttgctatctcggtgaaattaatgagaaaattcttcaaggtgaagaataatggaactagctttactgtaagcggagagaatgtctctgcaagccagttgcgaatctcagcacaggctcaagctcgatcaactgacaacatgaccccaactgtaaagaagctttgtagcattcttggaatgattggtttggtttgttgttgttacgatagaacaacatgggcatatcaaaaggattggatggatgcttggatcacaagtatcacatatgccggtgcatctgatagtatttgggaatcaatttcccatccatttgaaacattgcataacattgcagtgagtggaggagatcgttcaccagaaactacagctcgtttggagcgaattttggctggtgcagggttgaacgcacaagcccaagcacttgatgaatttggagcgtctagctcagtgatgggtcagacactgcaaaacatattggatgaggttgaaagtacaaatgtgtcaatcgttagtgaaatgaaagcattgccacactaccaccgaaatgccactaccttcaatcaagcggctcgtgatttagtgactgaaccagatgcaacatatcaaatgttgttaacagcagcaactggtactggaaaatcaacgcttttcccagtgcacctaaggtcacaatctcaaaagagagtcttgctgctcattcctctcgttgcagcaacacatggagtttaccagcgacttaaaagtcaaagggtgaatgatattggttaccatgctgattcaatatctgaaaacccaaatgctaaattaatcatctcaacatatggacacatgtgtgtgaaattacttggtggtcaaaacccttttgatcaatttgattatattttagctgatgaatgtcatgttgtaacactcgagactgttacagtgatatcccatttactccaacagcgagaaatggcgacgtggaaaacagttttcatgacagcaacaccattcaacaatatcacacttaatagtgttgagacagaacagcctgtaatcatgcaacagaccgagcatttccacaaccccaaaagctttgtagattttctaaaagctggcggcactgaaagagtgcaaacatatgctaagggaggctgcatcgtattctgttctacccaaaaagaaactgaggaatcagcgaaagctcttaaagcgagtggggttattgcactcttttaccatgcctctaaccgattggaatgggattcctttgcaaagaaaaatgagcgaagcatgggacaattaaatttttatctctttgctacaaatgcactagaatctggtgtgacgatccctatgaaaagttgcgttgattttgtaactaaaatgcatccagtagttggtggagataggaagactattactatggctccaacttcaattagcattcaagagcaattgcagcgtcgaggtcgagttggacgaacttgtccaggtgggtatctatacacatcagttggaaccccgttgatgtataaacttgacccagattcatccattaagtacttgttgtactgttggaagagtggtatcaaatgttataaggaagcattaaatattcctgatgaatgcacgataacattcactaaagagaaaattggtgctatttggacacatgacacaccgccagttgttacagcagccttagtggataattttggtgcagtttacaggaatgcaaacttcttcttagcatcacatcgaagaaattatgtggaaattccacatacaactgatatgattctgccctcaactctctcgacatgggagaattttgaattggatgggaatgaagtatcagatggcacacgaatgagagtaccacaaaatcatttctttttccgaaacgaaagggtccaagagagttggttgaaattgcaagctgcaattcttactgaactaactgaagcagaagccactaagaagcgagatatagttatcgagaatctgatggcgcgtcgagtatcgggccatcctgcttcgaagcttgaaatagctagaatgataatggccaaacaacaagtggtacaacaagcaagagacacgaaacgtgttcgagaaacccttagtgagagtatatctgattactccggcatcttctcaaacttttctggaatattttcagttcaagaaagattgaaaaaggcttctatcaaggctaatgaggaattagatatggttattcaggaaaatgaatcccatattttatttctacaagacatgataaaagaaactcctgagatcatccctgatatggctttagaggagcagatccaacatatggaatatgcaaaagccatattggaaaatggttggatcagtgggaatcctcaagcaaagcttctcattatgcgcacaacgcataaaaattttcatgatcttgttacaaaaaccaaggatgggacctatcgcatgaaatcatatgtgcaacgcatgttcgattttgtgaagaaacatccattgttaatttttatgtccattatgatgggaacgtcattagcagcaggatacttcatgatgagtaaagactctgaagatgacgatgcaatagtgcaggacaaggttttcaaacgcaatgataaggcaatgctggaatggtgcttgagaggcaaagcatgtaaatgtgacgccacacacttcgaggcacagtatgtacttgattcacgtcattatagaactattctcgaagattgggtaaagttcccattgcgagggttccacaatatacaaatagtaaactatggcacagtgagcaaatatgcacgtgctctagctttcctatcagtttgtgcactcttagctaacccgactatggtgtataatagcgcagcacattccatggctggaaatagtgagtataatgagtcagtagcaaaatccctaatgcacaatattctaagagattggaatagagtcccgctcatagacttattggtaaaagggatagatggaagtgatgatcgttatgatcagtacatacatgaattatatacaagtggaggcctaattgcatttgaatcagacactggaaagtttgaaggaaaaatgtctattagtcaatatcgaaaggatgctgctaaaggacaaacaaaacgtagtgcagcttcacggtcacgtgaagaagatcattatgatccgagatcatcaggtcgactcaagagtgggatcagacgagcatatcgtcaattctataatattgaagattctgatgtgcaggaaattatcctcacaaacaagaaaggagctccaattcttaaaattgggagtcttgatgaattgaaccaacatgttgatcttctaaaattctcagatccagaattgtatgagttgtatttacatgctcgagataaattggatcttgacgaacctgaaagttcaagcggcttcactggaaagtggggtgactatgcggaagatgatgaattcatgaagatgatatcagctttagattcgttaacaaaacaagcttcggaggaagcatttataccagttcaagtgaaacttcgagatgggcgaactgtccaggcaaatgtcgcacgttattggcaaaaagattatccaactggaaaatctgtgaagcaatgggctcaaactacttgggctccaccacaattcacagctcttcgagaaagggtaggaaaagctcttgaactgattcctgaatcgcgaccaattcatcttcatggaaaagtcccaaatggaacacttatagagttccaagatgcaatgaaagatctgcacgagaagacagcagtcaaggctgtagctgaggctaaaatcggagatactcaatttgaggcggatccttctgatgtaacaagccgggttggtgtggttatggtgaaaacatcagcaaacgctgaatgggaatcatggaaccaatgtgttgctttgaataacatagtgatttttccccatcattacacgcttaaagatggtaataatttgagattcaagttttcatcaagtgatttcgaaagcacctgtcacattgtggatgggtacaatgggcttgacatggcttgggctccaattaacgttaaaattcgtggtttgaagaagaaagtttgtttaggcacgccgcggaatggatcttacctatggcatttttccatgattaatcaagggaaagatttgccagaggctcgtcttatgggatactcctctgtaacgaaagtacaagaagagtcgcacccatccttcgattggacacatacagtctcaacgcaagttgggaactgtggtggaccctttgttgataaacatggtgtcattgttggatatcacactggagcttttcaattgggacaatttaatactttcctgggattatcagcaccactaattgcacatctgacaaaattggatgtcaaaccaagtgcccagccccaatcaaagatgatttggagggaagtggatttttatcgatcaccaaattacttacccccaaccattaataaccaagagccaattccagaggagtggagatatccagaaggtaaatctgtttacccatgtgttgatccaggatggatgggttctcgtttggtgaagggatcaggttttcgtctcattggaaaaatgcaacgtcatgtggaatattcaacgaagatttcccttaatgagcattttgacatgtggatgtctcaagagaaaactcaaaatgagttaactaggctgaacaaaaatcgtgtagagaaagggttagagaaagctttcatcagtcacacgatagcagctcagaacaaggaagctgcaattaaagatacgagcaagtatgctagaacaacgttgggaacatattcagaacctttgttgaaaagagcgactgctctgacaatccaaatgctcgaggagcatattaagctatgtaaacgccaaccactggatttagtctatggggatatggaatggaacacagcatgtggagcccagtacaatggattgaaatcagcatttagggatcaagttgttggcatcgagaatatggatgcttatggtcaatactgctgggagcgtttcaacgttccaaccgatcaatacaaaccatgcatttggacaaattcattgaaggatgagttacgaccaattgaaaaagtgaaggagaataaaacgcgcactttcactgcagctccaatcgagtttgtaattggtgctaaacaagctgttgatgcattcaatcatcaattcatggatgcacatttgaagctaccacataccgttggtattaaccaatggtcagggggttggcacaaactatacaagaagttgtatggtaaaaactttgtgtactcaagtggagatggaagccggtttgactcaagtccgtgtttctatatgttcgatgccttgtacacaatacgtacatattttgcagatcctgaaatacaccaggttctggagaatatctacttggaggtttgtcacactccaatagtgttacacgatgggaatgttgtgatgaagaatcatggaaacaatagtggacaatgttctactgttgttgacaatagtctcattatgatgattctatgttgcgcctcttatctagagcacactccagctaccatgcattccctcgatgcaataaaaagccattggcatttttgtgtgaatggagatgattatattggaggaatgtcaccattgttagcaagccatttgactaaagagaagatggcaaaaaccttcagtgacttccagttcatatatgagtggtctgattattcaccatcattatttgaacaagattatatgagtttaaaattcataaacattgttgaacgaaaaggacaaacaactggacaacagttaattgctccatggcgtgaagcatcacgacaactctccactttggctcacacatcaagtggtgcacctgaaatcaaattacaagttgctctaaccgagagggtgaaagcatgggttgataaagatttatttgatttcataacagaatactgcagatggctcgtggagtatttcgatagatttacgaacacgcaagcatggaatgaagctaagaagttatggtgggatgaacaacaaattttcaaccattatttcagttttgaaagcatttgcaatgcgccatactcacaaattgtaaacgaaactcctgatgagttctttgctaatggtgtgagagagtcccgaccattgcgaatcctacgcgatggcatcaaatttggtgttgctgttacagcagctaattatctgggaccaagcgatcacgatgtacccatgattgcaaacacaatgcttaatgttgccaagataggtctcgcaaattcaacagccgagcggattgaccgtatgctatttgggaaggaaaaccctgaacatagtagagcggattcgctagttgttgtaaaaacagagcaaacagatgcgacgatctgtttgcgaactcactgcaaatgccaagcacagcacttcgatgggaaatatgagtgttgggtgagttccccatctgttgctataaaaatgtttgcaacattaaagccccggattctttccacaacgaaatttgttggagttaagtttctaccaaaaatactaagagctcatgtatgggccttatacctatctggattctcttgggaagaaacaatgcaaattgtgcaaagtcactaccctggcgagaaacagcaaagaaaagcggattggttcctacagcaactgctgaaagagctagtattgatattcaaagtgaaagggtcgaagtttattgagttgggagagcatgctcaagttcaagggaaaactcaactcgactctacacaagttgatatggatccaaattttaatgctgcagcttatgctgcaactcttcgaggaggaccgcactggggtacacataattcccaaggtctgtttgatgctattaaggtattaaaccccaatgcagcaaatgttgacattgggaatgcgcgaactgcggttcagcgcgagatgcagcggttgatagctgccgatgctccgcgacaacaaccaccaccacaagttggtggaggacaccaacaaccacctccagctggaggtcaaacgcaaggccagcctggtggttacacaccgagccaggcatttaccaataaatttggtaatataatggctgagcccgatgcccccctcgtgctcgactctcaagcaacaatgagggaagttgcccaaattgaggcagcttgggctcgtcttctagaggtgcaatctctagagggtcttggttccttctggaactacatgttttcctatgtgggaaacaatggcacctcatctggaggtgatcccagggattacatccctgcaggaaatgggcgagttacacttgcccaactaaagtccaaagctcaaggtgagcaatggcgacgttattggcgtagtcatgcgtcagacatgagggatttcttgaggcttcttcaagcttcagatagacctttgcctattcgttgggcaagaaacaatggcattaaagatgccaattacgagattgcattcgattttgcggatgcactcccagatctctcagctgcacaaatgtcaattattttagcagctaagaaccttgccgtaaggcgaggtcaaggccagatgcttaatgctggcaccaaggttggaggtcggtcaagaaccgaaacctatgaccaggctgtccgcgatgctgcggatgtccaattcccaggagcataattttattatgcaacacaacactctttttgactggggggtgatgtgtctggacttgttacagtctttttctttttcaagtgatgtggaatggaccttgaatcaaataacatttgattttggattcacatcattaatcttcaatagggtggatggccctccccttttggagtcgtacaggacgtatcctgttttatttagtaacatagcaataaacacaaaccaccatgtagatagccgtttcagtggtttggttgtgtgtttttcatttctgtcagaaaacttccaaaaatacaaaaatataaaatttttattttgtcattttggttcgttgggcccaagcgtcttgcatagcatgtcgttcattcctgaaacgagtcccccgatagtttcacaattagtgtaccggacaccttttaaaatcattttcacactttgtgatgaatttgtaaggcgtgtgcgcgtgaaaccgtggtttggacctttggaaagaggctacgctctgtaggtagttttcgatagaaaatggtttcccttaaggaaactgttttgttactttggagttccggcccccaaagtaaatttt

SEQ ID NO: 598 - DNA, 6552 bp, Black grass varicosavirus-like virus
  source 1..6552: mol_type = other DNA
cgccaatttcaaccctcccctacttccgattgtgatttttcatcgcatcgagacacccacaggtacagggtcctagtgtctctaacaccaactagaattaatggtattgattttatgtactaaattgtcatctgttctacaggagagacggcagagtttcccaagcacaagcgagatcaaggccacgcataagctcgacaacagagcgtgcaacatcacaagctcataaagctcaatggatactctggagcacgctgaagccaatgagctagaagacgatgattactttcttcctgacgaaggacctcttcatgatatgcacttggctagtgcaatcaacttggatcagatacaggagttgatgtatccagggactataaagtacaagatagatattccctattatttaagggatgagtacatgctgatagaaagtttgtgcaaaggagacaagatcaaaatggagcttggaatgttggctccatctttgaaactgtccaagcctggaggagaattgtcaaccatggatttacctgcatataaagaaataggaaaccttgtctgtcaggctttgaggaatagggacatcatgattcctatctccatgaatgatgtggcgctgaagctcccaggagtaatagtctacaggtcatggggtatagcatttgcagaattgttgaagattatatgcacaagagcagaagtgatgaggggagggtctcagcctgtatatcaaggcactggaattgaagcaggtgcagcacattgtcagtttcaagtcaacggcaattggtaccagatcgttgcgaggaagaatctctcaacactatatgacaggcaagagaatgtaatgtatataggaaatatacactcattgcttttgctaatggataccatcggacagaggatttgtttaatggttgccaatcagatagcagaactttatgatacacctggatgggttgatcaaggaaaaattgaccaaatattatcaactggagatgacattctggaagaaatgggaaatgatggatatgaaacaattgctatgtttgaatctcttgttataggaaaggtgttgagagcaactcccgatgacatcacagaatgccataagtttttgtacaactgtatggatgaggtagaaaacatgctactaaactctgctatgagaggaagaatcattgaacttgttcacagatggttggccatatttgacagtttatcgatcaaagagttatcaaatgtcttttgcttatatcgatgttggggacacccggttgtaaatatctatgaagggatggagaaagtttacgacatcggcactgaagagaaagaagttagcccatgggtagcaactgacatattgtgtcagttcagaaaaactttcttgataaattattacgagaagcatcactactatccaaacgtcttgatatcagaagaggtagaaaactcatatgttgctcaatgcattaagaagggttcttcaatagaggagatgtatcctacttatgatactaaggacttcttgggaatcgaaatccagaagatatgggacattccaataacatttgacctttgtcacattcttaatgataaagcagtatctccgaaccagaaggagctaacagacagtgttgtcaggtaccaaaacactacaggaggtcagaacagaagagggctccttagatggttgagaggaaagagcttaaactgcagagagttccttcgggagatagatcagaacgggctccctgaggatgagtgtatcattggaatgtacgagaaagagagagaaatcaagatcaaagccagaatgttttctctgatgtcagaaaggatgagatattacttcgttttgacggaagaccttatagctaagcacgtgctggagctatttcccgcaataacaatgaaagattcacaaaatgtactccaaaagaaattttggaccgttggcggaatgggaaaagactccacattcgacgttaatatcaacatcgatttttcgaagtggaattcgaacatgaggaatgaattaactcaacccatgttccaacagttggataagatcttcggatataccaatttgatatcaaggacccacgagatatttgaatcatcgtttgtatattcatcttcaggcaagtatgttcccactgtaaagtttggaaaactccaagaggatcctcctatggcatatcgtggacataagggaggctttgaagggttgagacaaaaaggatggactgtagctacagtatgtgccttatctgcaattgctgagagaagaaatgtgagaacaaaactgatgggacaaggagacaaccagatagttagaatactgatgcccacccagagatggaaatcaaatgagcttactatcaaagaaatgatccaaaatgccaaacagatccaaaaagcctttgtaaccgatatggagagaacatttgaagaggctaaattgcctatcaaggtgagagagacttgggcttctacgagactatttatgtatggaaagatgatcctacatgacggagatgcgatgccccaatggttcaaaaaagtgctgaggtcatacgctctaaccaatgagggtcaagtcactgtagcaggggtggtaggaactattgctactaacatggcttcagcggcaggattgagtgaaatgcctgatgtcatgtatctcatatttgtagcaatgactgagtggtcgctcggttacttgttagagtaccacccattcacacggaaatgcatcctaagagaacatgagtaccatgtaaagatccccggagcacatagaggaagagattatagggtgaggtcagttaacaagagaagattggtagtttctatgatcctgataccaacggcagctggaggaagtgtaacagttcctctccctggattcattatgaggggattccctgatcacgcctcagaggcttatgcctggatcaagatgcttgcggaagtaaagagtccatacaaaacaatgttaaagaactggtacactttcatcgggaatgattctatccaacctgatatgttgatccagagcccgtcatcaatcaacttcttgaagccgccaacacccagctttcaagggagaatgaacgtaagagagctcttattgtctggagaatttgatcagaaccagttcatcaaagaagcaggaacaatattgggagtctttgacaggaagaaggtctgctctgcgatgttaacagacccaatgaaccctttcataacctcagaggtttattccacttatgcccatgtgtacatagacggagtgataaaaagagtagaaaacaccagtactatcaagaagttggcccaaaaggtgaaaaccaagactcaagtcattaaggcaatgatgtacaatgaacataacttcatcatgttcataagttggagagcaatgaaaagaggtaccatcgactatgattgtgcaacccagcaagctagaatggctaggaatattggttggggaagaacaattactggtgtgaccacacctcatccagtagaattggggattggtcatatatgtaaaggtagacaagatgaatgtcctccaacggattacatttatgtcagaataaatgaaaagggagaatttgtcccttatcttgggtcaagaatcaagtgtaaagtcgtatcagagcaagatatagatgccagaagagagccactgattgctgtgggttcgcgtatatgcaggtactcgtcgtggcttggaattggcccaaatctgatggaaattgttgagaaaaacctagctgttgtctgtgacacatctgtctatgacaaatttatagacgatgatccaaagggactgttgtcatcaggatctattgatcatagattcactccagcaggagcatctgagggagttttcatcaactatgcaccacagattggttgtaatgtgtacatgtcgagcgattgtatgccgacctatggaagaggccagaccaactacactttgcacttccaggctctatattgttggctgcaatacatctcatcaaggagggctgaaagtgtattcatgcatcatcacatagagtgtgaagattgtgtcgtaccaactactgatgaagtccccgacatccagtgcccctttccctatttcgataatatatatcccccaagagtaagggacagcatatcaagagccttgggattcattgataggaaaggaggactagatattatgagcaatgtaagatcattgtgtcatgaagctgaaccaggcatgtttgatgttagacaattgcaaaagggagtgatgtggacactagcaataaagatcggatttcgattgtaccatgggggattattcgggtcagatgataccagagttgaggaccttcaggagtatcccaggatttactcatataaattatacagagataccttactggtcaatgtggcacatgtgatgatgatgcttgcagccatagagatggataaggcacctgatggtgaggaactcgcaaaagtcagaagaagagcaactgataaactgttgtcgaaacccattggaagcttcaaggggttaggaggattaactctaggaaggactgatgagaatccagataacagtcatttgtttatgactggctcattcccagaaactgtattctcaatattgaatacttccaagactgcattaatagagacaattggtcagattggacgcttatccatcgaaggaatgggccatcttcctgtggccaaaggttctctgtccaataagcagtttcgatttctgataatgatgagatgtttgttagaatgcaggaactctcattactttcaacactttcagaagatcccagaggacgaaccaggacatccagcggaccctcaaaatgacgtttatagaatgcttgtcaaaactcccgttctagatatgagtctagacaagatggtcaaatcacttgctgttattaacgaaagaaagactcttccgataatcgaatggaataacatctccttcgaatcaacagaagtgatctgcaggacaggaactcccaggtccatattcatcggaaatagaatgatcgttgagcaaaatagtagaagagagtacagagaagtaactcttccaacatctagcatttacaagtgggctgggatcttgtttcacaaacccttgaaaagacatatcattgtgttgggagatggaacaggaggaacctcactgttggtgaaaacattcaatcaagactctacagtgtacccttgctcctatttagaaacccataagattattccccaagatatggaatgtttaatgcctcaattgtctagaggatatgagggaatctccgggcgagttttgttaaatgttccagatgatatcaaggatcctctctggtcagaaagaatgtctagtgagataaatgacatgggcgttgaaaggacctctatagtctgcgatatagagaccgttgggctatgtgttctccttgatgcattcaggagtttacctcaaggagttcaagtagttatgaaaacctatgccaaagatatattgactaatatcatgtcaataatgggcttgaatcaggtagaggtgggattttctccgcatctgaaccagagcaaccatgaagtgtttctaatgggacacatctcacagaattcttttccagatcctgacatgatgatcaatcaaatggtaaagctttatggtaaggtgagagctgatccaagatccagaatcctggaggaaatgaggatgataaacaaagtattcaagccattaaagaatacgtctgtgtctctatctctagctcatataaataatctgggaattactatgaccagggagatattacaactggatggacttgagatctggggatatgcactgcaatttgtaaatcgtcattatgttgacccatctcatagagcatttcttgctgacaagaaaacgatgaacaggaaaagaaagagagatttgacaagggcattcaggatattgctaggagtggttgtgaatccaggatacctggatataaaacgcaaatggggtattagaactcccaaggaattcaaaccaagaggaatgaaccttatactagccagagattgtgatgatatgggtgtcaaattaaccaagaaggacaaattggcctctgaatgccttcattgcttttggaccaggaagatgaggaaagctcctctagatgcaccagatccaccgggggaagattggatggaaagtgcaacaagagttcgatcatttgccagcagtttatctgagcactcttctcatgattacatcaatgtcattgagacagagtagtaagttgttagtttccgtttgatgaagatggccagcagggtagaagaaaaaactatcaaacttggatacaagcagcagatcttatataaaacatagtatcattcgtaattattgcaccagagatgaatctaaatggcgaccctgtgacctatagcgtcattgataacgcggtcagattgcacgtggaacgcagcacgtatgggtttatgtttgaggcatgt

SEQ ID NO: 599 - DNA, 11988 bp, Maize suscal virus
  source 1..11988: mol_type = other DNA
caggagtgagtttgcgtctcggttaacgttgttgtagccgtttgagagacaacgtatcgattccaacgccatattcttctcatactcatcaatctcacttgtcctctgtccgcccagacaccaacacaatcgaacatttcctctgatggctgaacagattaatcacgcagctccgcccaggcgacagccaagatggggtgcttcagctatgtcgaacttcagggtaaagacgaaagatctggctacacctgactctgcaaacactccggcccacatgattgggggcgattctcttcagctggtcttcacagataaagaagcccttactggtagattctttcttacatgcctgactctcgccaatgatgaagctgttactgcaccgcagacaatagcctactatttgtctgccatggctattgtatttccttcaatgaagcctgatgcccaggactggattaagcacgcaggttatcgtgttgagctagtagagactgaagaagatctggctgagatggaagaaatccaaccatggaggccaactccagagctagctatgatgtttgggcagtctgtcttgattgtgttcaagaatatctctgctgcaaattatctgacgtacatcagaagcagagtgaaggcattaaaagcccatgtgggtgcgttttctgattctattgatggtggagaagtcttcagtctggctaaagcaatggttatcagagctgcacttggaaacaacgtggagttcaagaagaaaatactgaatctcatgctggccactcgcgaagtcgctggagcttttccggcagcttgcaattatgtgtgtggaatcctggaatggaatgagatgacggcgattgtcatcatatacaagatgctacttctcaccagctcgccggtcattaatgataaggagatcagagatgaggtgcttcacctggctgttgcgtatgaaaagatcaaccaatttgagtatccccagtactttcgcattatggcttccaggagtagagcaagggtcctagagaggcatcactatcaggtcctcaccactgtcgctcaagtggcccagaaggaccagacaccatctcttgcccagtttgttgccagtgttcctgaaaacaatcttactgtgattcggctggtcaatatccatcgtcgtttcctggccaggactgcagaagacatacatctgaaggctgcagcattcctcactgcagttgaagaagaagatgttgatgaagaactccctcctcgtgcttgattaggacagtgaggttatacccaacagacatctaagctggtctctgcgatggtctttggcggctgagcgcctttttgtttttggtctacctcatgctttctcttttgctcttggtggtgagcagtcatctattagtctgtgagtcgttggttaatgtctcagtctttaatgctactagaaaaaagtgagaaacgacgaacttgaaagaaaaaatggagcggaccagcaagctagagcggctcattgcgtctagaagtctctcattcggagaagctttgatcgctcaatctctactaaactgtgcaggtcgagatcacttcatgtcatgtctgggagacactgagattgtgtttgtctgtaaccaaggagttgacccatctctggtgagaagactaatcaccaattgcaccaagaggagtgttgtgcttccatttcgcttacttgagttggccacttgctcgatactcacatccgcgggttatgcagcagcaactctctgtagtttaatcaacaaaatcctagctgggcgtgaaaacaggtttcttggagtgatgtacatctcatctggcattaacttcaacggcttctcatctccaggtgttttggcatggaccctccagtactgcggaccgctgatggtgagatctcaaagcgccagaaagacgcttggtctagtgttcgttgactcccaggtgtacagaacttccacagcctgtgtctttgtagactgccagtgggaagaagagattctgagtctaaccacagtcatcgaacgagtcaactcacataccatgaattatctgagttctgttgaaggcaaagctattttcaagcgtgctgccctagctgtttgcgcctatttcaatagtgctgcagactggtgaaggtcctggtgtaggtgaataaagtaagaagatagaagactgtgcacatgtaggagattcccctaataagggtatgtgtgatatttgcatgtctaggtagactgaatgtattgtaagtttgtcgtgcagcccacagccaacctctgatggcagcttgttgtctaactttgagccttcttggcagttggactaagaaaaagtgagagaccaagcgattactgtgtttctcaaccttgcgaaaaccggagctagttgacagcacgcgtgagttcaaggcgcaaactgcaatggcgagcggaagtgggctttcaggtcttacgagtgaaggtgtcgaaagcagaggaactagtggggatttggaagagctgccaggaggagggctgtccagagaagaattcgccacaggaggacaaaatttattggacattgctactcaagaccctcggtttgaccaggtcagggcacaatttgctgacggtgacgatgaagagggagacgtccctaccaatgaaaacacgttcgtgttcgggaccttttctgggtctccatctgccacccagcatactcaagccagggtcagatcaaatccagtgtttaaaaagaagagtggaggtgcaaatccatctgcaagcagcagctcagcaccggtacctccggtcgcagggaacccttttgggtcaccgcagccatcctcaggattgcctgctcagcaaccgcagctagcacaacagcccccaatgagtgcggctgctgcagcaattgccaagatggaagagcagatccacgcaatggtggctcaagtggattccactttgccacacggctacccatcggtggagtcagtcacgactgacactgagcggctcgctgcaatgatagctgacactccttatctttgccttgagacaattgattcgaagcatgttgtggcagctggaccatgggtcgtcaagataagctctgcccagctcaccctctctgcatatgaccagctgatcttgtctatcgctgggaggtactattcttgcttaccgatggcaccagcagatgatctcacagcacgatttttgcacatctgctcgcgatacggaggaggagaccaattcagatcgcaagaggtcgatgtggggctgaatgcttactggaatgaactgtcaagcgagggagttatccatctgccgactcttgcttccaaggttctgcttactggtgaagctatcgcggcacctcactattcagattctatgactctcgcagatctgaccaagagtttagatgaggtctggcaagtatatccaccgattcggacagtttataacatgtgctaccaagttgcccatgaaggattaaagtttgttagtcctcttcatgatgccttcaggtttaatgatgctgcggctttttatgtggaccggatagcttgcggttctgactatattcgattggagcatgttgtcattacaccaagggcatccaacctccaattcaaacaacctgaaatgcctttagttgtcccggtggcaaacccgccaccagaagcggccacaggagcaggagacatagctgcgcagacagcagctgcaactgggctggtctctgaaaggcgcagaaattctgcaagaactggagctgcaacttcaggcgccactgtgccgggatctggcactggtgcttctttagccgctgtcaatcaagacccagcgcagcctacccctgctgaccctcatagtttgctgaaccaagggttgcctgcacggcagccacctgtgcgagacacctcgaccttcagagatggtgtagtcgacttcaacggtgttttggttaaagttcatcagttattgtcaaaccaggcctcccaagatgcaaagttagaccttattatgcagaggctcagcaacattgaagccatggtggatggggttgacaaggcatttgctgcagtgataacacgccactcccgccaggatctgactcaccgccagacagtcaacagcactctgctccagccaagttcttcagaggcccagaatctcgccagcgggtctactccccctgctccacctcagaccaatcaggtccttgaaatcctaaagatcctggaaggaggtcatgccgacgagctgacccttgagctggttgctcggttgaaggctcttattcttgagaccggaaataccagggccgctcagaacatcaccattgagtcgatcaagtttgagaatgctaggaagaggactgttcagaggatcaaaagtctcttccaccttaactaagtgatgacctggtcagggtgtgggaattgctgtttcactaagcaatgactggtcaaataaatcagtttgagtcagtcggtcctaggtcgtgagccaagtgggtcaagtcagtctagttcctcagttcaagtcgtcgagtcttgggttatgctttggcagcccttcaaaaactagaaaaaagtgagagacttgagaataactttgccatcgtcctcctgcaacagctgagcgcactcttctcgccatggagacctttctagatgaacaatttgatgatatgctatctgaatttgagcaagcacggctgtctcggtttccagcctcacatcacagctcggctttaacatattatcctcaacgccatattctgtcattaatgtctccaaactgtcctgtgaaaccaactccccttctgcgggcatactgtgatgcggtcaataaagtatctgatctcttggggggtgggtgtgatgccacagacaacccagctccagtatactcttatatcttctctcagacaacggcttcttcgccagcctattatgacccagactatgaggatccatacctgctggattccctgcgagcagcctcagatgctgtgcttgaagatattgaagctatagaatctcatcatccgggtttttcgctggataaccagaagttgcgactgctgcggaaagtctcttcacgtctccatgcttcctgcaaacagatatttgcggtgcgaagaatgttagaaaaagttagaaatcaaatccagaaatgtcacatcggggttgatcacaagcttatgccagcagtgagattaggaaatttgagtatacacactgttagagatctcatcttcgtagccggactgcaaccattccccatgcgcatccatatactaaattacgatcagtggctaatgatctacgacacagtctgttgccgtgcaatggtaaaggtggcaactttatggaacgaggaattacgcactgacaatatcccttcatgggagatcgtgtcctcagtttataaatggggcgacgcacttttaaccaactatggtgtctcagcgtatgctattataggagaatttgaatcaatagtgactggtgtcttaattacgttttctgacactgacacactaggacttggtgcctcatttgtcaactcaataatggagaacgcgcaagagcaaagcagagcttataatatacctgcgaatgagacattgaagctgatatcattgcttagaactgttgagtctgtgaactggctgtcagagttgttcggtttgagaaagcattggggaaatccaatggtggacgcgcgagcatcgggaaaagcagttcaggagaaggtagatgaggtattgccagttaaagggactgcacttgtgaaattattggcatctttcaacaggatggttacactgtcattcatctctcagcatgggcaatggccggacggttactacctctcgaactcaagagactgcccgctgaaaagagccttcgaatcacggtctacccgtatcccagagactgtggaagggcatcgtcatgaagactgggcatgctttgtgtttctacccaactgcattttagactcatatgaagatgacctggcattaatatcagataaagctgtcagtgtgtaccgcgaacacttagattcagtctatgtgcgggctctctgtaataagcagagtcagggcacggttgaggaagacagaaggttgatgttagagtacttgaggaaacagcatatgccaatactggatattttcaaaatagtaatgacagacgcagtgccgccccgatggatggccaactgtgctagcatgaaaggaacagaaatgaagcacttgaaggcccgaatttttgcggtgcttacatatgagatgagacagtactttgctgcgtcagaagacatactgaagaacaacttatttaagtataacccgcatcagactatgactatgtcagaaacagagctattgactcgactaaaatcattaactactcaattggatccaaacagtcaaagccggcagctgagtgtaatccatattgttgatttttcgaaatggaatttgagaatgagatacactaatacatgcttggtattcaaatctatagacgatttcttaggaactccaggcttgtttgagaattctcatccactcttcagtgatatgctcaacatggtttcagacccattcaatcctccagcgttaggagtagaagagacagaatctgacactatttggagaaatcatcacgcggggtgggagggtcagcgtcagaagggatggacaatcttaacatctgcactcttgtctgacctggagagaacaaccggagttcatagtgaaatatgcggccaaggtgataaccaggcactactaagcaaatttcctgtccccactatctataggaatccggaagaatggatcaagagtgatcctacggaggttaggaaggtgcttgacgacttctatttgagattagaaaaggaatgtgaagctgtaggtctgaagataaaaacagctgagacctgtcgaagtctttgttttttcaactacgggaaaagactctatttcaaaggcagtgaactatccatgaccctaaaacggttctcaaaaaacataacccagcctaatgactcatacccaacaacagaggctattcttaagacatatgagggttcatcttatgcagctggcctttatagccatccaagtctgctgccatactggatgagtaaattctctgtagcccatcaattattcaacagcttcactaacaaccagctttgtgcagaagccccagtacagatgatgtccacctttgggttcccgatcaactaccgactgatcagcacgttgatgaagatcccagcatctctaggtggcccacctcagcagtgtctggctgattatctgctacgcggccatccagatccactatgcactgatttagtcgggttgacattgaagtcaaaggccgggtgtgtgatctctaagaagataattcgtctagctcaatctggtaaatggtttagccaacgcactctgaccagagattccctaatcaaatctccttattctctgaacctcagggtcccattatcagttcgacaaccaattgaagaggctgtgctcccggctgtgcgagctcactgcaacaataacttagtgaaatctctatttgatagctcgatggatgacgacgagagatatattcttgactctttaggtcttatgaagccgttccatccgctcgtggccaacgatatttattcaaggactttaccaggaagaagacagatgtttatatcaggactggcgaataccacgagcttaggtcgcctgattaaagggaattctgcgtttcctctgatctacaaagtcatggatttggagatggagcagctaaaaagctggatagtccagctaacagagcttctcggtttacctgataatgatgatattattcttcctcatcatatattagcgcaacagctgcgcgagaaatcgtggaatacagtcattgagggcataacagttccacatccgttagaacagttcatgcttactctatcaaaatcggacgtctgcaccaacgactgttatacagtagaacctgagcatattgtattggttcaacactccgaggatgtggttgtgtctcccggtgtggaccgtgaccacatcacagcagcgcggtcaaagaaagggagcccctatcttggcagccatatcggagaaggcattgtacagaagcagcttatttgtctaaatccagatacttcctggagagatgtcattagactaaacactatcaagcgttgggtggctccagaggggtctaggctgaggttgtttatgaatggaattataagctcgcggactaacatatctcgtgcctacatagatctcgccacaggcgttccgagtagattgtcttacaaccaccgggccagcctgatggggtcaataaacagctgctctatcagttcgaccacaaacatgcacacaaggttgtacttatcctcgaacagaatgggagattattctcatggtttgaaaaattatcacatgcctttcgggcccacctttctctgttatcagacgctcgtctgcttgatcgggatcttttcacctgagaaatgggcattccctagaaatgtttatcatattcatgtcagagactctagggtgccgccggtgtacgatggcgggttagagctagaagacctaactgtccttgatctgaaaggacacccgcctaccatccttaggtgcttagcctccaaactggtattcgaagcagcaccaggatatgcatcgttcggattttggtgtgagttcgaaacagcatcgaggactgatgcgaaatatgggtatgcccaacagctgacgggtggtttgttcattcaggagacggttgtaagagaatctataacacacgacaggattgggagctttgcatcgagaccggctgtcatatcaattggagacatctcattgatcgagccatctctattccttcgttccatcgcctggggtatgctgttgctcgcacctatgcatctgctgcatttcagaggcaaatatgcattcaaagtttcctgcgtggaatatgtcaatcttttcagccgagctttttggtcttcatttgaatccccaatgagcaacccccgaataattaggaagctcggaaagcatgtcgcgttgatgtctagtcatagtctaggtaggctagattccggcatcatcccagctctgcagataataatcgttgaagagatgtggtgtatcatacattcgatcgccacctatttccgtcgaggaggtgataaaccgaatatcccccccatctttgccccatcgggttctgctgccctactcctcacctcacgagtgatagaaatgatggtcactatacggctagtagttgggaactgcagcatcagtaagatagtagggttcccaagagatttctcggcaaatcttatgagtgtgccgcagccaatatctgccgcagctctgatcgtgatacaacatgacttcttagaattgcagcgtcacttgaaactgccattacgggacatggtgatacccagagtgttctcaacccattacccctgggttgatatcttaaggaagactgacagtgtggaggcagacgatgaagacccgcagaggcaattagtcctcccagtcgactttccgcagtgtgctaatgtagtagaatttcgtatccctgagaaccctgtgttggagactactccacaatgtgactgtaaaacgacacaaagaaagagagatttacatgatgaatgtttcttttcgctgagtgggaactatagcaaatcccacctcaaaattctggagttgatcttttcgttccacctgcctatagcaaatctctgcgtgcttggctctggcactggttctgaagcatgtgcgttaagtaattatctggactgcagacaggtttatgtgaattgctaccacaaactaactgacttctccccgcatgctgcttccacttatgttccgcctgcattcaggtctgatggtatagtgactaagctcgtctctccagcctctgctgtcctaagtctgtcagatctcacggacatcaggactgcggatgctatatatcagcacttaagaggtattgctacaactggtatcatttgcgatgcagagattccaagtgcagcaactcctttactctactcacagataatgcatacaatagtggcagttgtgaggaagaaagcctctatcaactgggtgttaatcaaagtgccgatcttctgtgttcataagcttcttggcctggcagctccactagctcaggccttccatagaatcatctttgcttatccagacttcgggaagcctcattcaagtttggtctatattgtcgctactattcgggctaaggcaactccaattgaagagaataggctgcctactgtaatgcttgaagacgagatgctcagagagatgttggcctctatcagcagtcagaaccattgtagattatatgagatgagggtagcggatagaataagtcggttaagccttaatctaacccttcctcaaagcttgactgtggcttcgaatcggtttgtgcaaggcctgatcctcactgaagacgaaatctccgacccggaacaagttataaaggtactgaaggctgtgaggcaagggttgttgacctcagcacagaaagtagttgaaactcatttccgagttcataatgaaatcacaatgccgaggtcagctgtcctctctgcggatttaggaacccttcacggacagttaaacaacacatacctgaaagtcgctaaatgtgatctgctgttagagctgttgcaccttattcatcctaccctcgaacagatcaagaatcgtgtgtacagctggttggctacagcccactcgtatagaatgagaaacaggaacttcaatgtctacatcaaccagaccagatttatatcacatgattctagatatttattcgaaatccttggacatcttatgaaaagatctgttcccacagttggactccccatccatatggattaccatttattcggatctaggacactgaggcctaagcaacttattgttccttgcccaataggcgtatgtcgaagtccatcaggtagaactagcaaatggaagtggcagaaacgaagtgagatacttggttgggcaatctcattaaccctcacaaatttaccgatagcagttgaggatcataatagcttttcgctggatttcctacacgaaaaaggcatcttagaagatgttcgcatgatggcctcattaaacccatcccgcatagaggtcccttacttctttaggcccaatgagatggccctcgatttgttggcgcatgaccggttgttccttgttgcgccgttgaattctttctcactactcagaagccgttacacaaccgttgagccatactttgttccttggtcgggggcccctttagcttggtgtctattttatctggaggagcggaaccaaattgatagcctgattgtggatgagatctgccttgatgatactctgtcggtcaacacttatgtcgacacagacagcatgtcctgtagatgcctgagctgcaaaacggaagaagtcttgggagagaggttttcgttaaataccaacgatctggatttcctgtgttctcttggatctatagagacagtctatgattctgagcatgctttgtaggggcttatcgctcgcagggactaataaaaagtgagtatgtgtaagctgagccaaagactgtatcgccagttttatctaaaagtttattgtgaacttaatttaaagttcctatctgttcccatttaataccattaagaatgtggtcccagctcacctcttgtctagtccaattaagctgcagattgtgttgggtatgacataggacatatgggagtgacaaagttgaggtaataggagaataaaagtggaatcgacagtagtatcggcttgtacaacgttgagcgagacgcaaactcactcctg

SEQ ID NO: 600 - DNA, 76 bp, Tomato brown rugose fruit virus
  source 1..76: mol_type = other DNA
gtatttttgttttacaacatataccaacaacaacaaacaacaaacaacaacattacaattactatttacaactaca

SEQ ID NO: 601 - DNA, 13 bp, Celery latent virus
  source 1..13: mol_type = other DNA
aaaatttaaattt

SEQ ID NO: 602 - DNA, 235 bp, Black grass varicosavirus-like virus
  source 1..235: mol_type = other DNA
cgccaatttcaaccctcccctacttccgattgtgatttttcatcgcatcgagacacccacaggtacagggtcctagtgtctctaacaccaactagaattaatggtattgattttatgtactaaattgtcatctgttctacaggagagacggcagagtttcccaagcacaagcgagatcaaggccacgcataagctcgacaacagagcgtgcaacatcacaagctcataaagctca

SEQ ID NO: 603 - DNA, 142 bp, Maize suscal virus
  source 1..142: mol_type = other DNA
caggagtgagtttgcgtctcggttaacgttgttgtagccgtttgagagacaacgtatcgattccaacgccatattcttctcatactcatcaatctcacttgtcctctgtccgcccagacaccaacacaatcgaacatttcct

SEQ ID NO: 604 - DNA, 200 bp, Tomato brown rugose fruit virus
  source 1..200: mol_type = other DNA
gataatcgagatgcttaaataacagattgtgtctgcaaacacacgtggtacgtacgataacgtatagtgtttttccctccacttaaatcgaagggtagtgtcttggagcgcgcgggacaaatgtgtatggttcatacacatccgtaggcacgtaataaagcgagggattcgaattcccccggaacccccggaggggccca

SEQ ID NO: 605 - DNA, 583 bp, Celery latent virus
  source 1..583: mol_type = other DNA
ttttattatgcaacacaacactctttttgactggggggtgatgtgtctggacttgttacagtctttttctttttcaagtgatgtggaatggaccttgaatcaaataacatttgattttggattcacatcattaatcttcaatagggtggatggccctccccttttggagtcgtacaggacgtatcctgttttatttagtaacatagcaataaacacaaaccaccatgtagatagccgtttcagtggtttggttgtgtgtttttcatttctgtcagaaaacttccaaaaatacaaaaatataaaatttttattttgtcattttggttcgttgggcccaagcgtcttgcatagcatgtcgttcattcctgaaacgagtcccccgatagtttcacaattagtgtaccggacaccttttaaaatcattttcacactttgtgatgaatttgtaaggcgtgtgcgcgtgaaaccgtggtttggacctttggaaagaggctacgctctgtaggtagttttcgatagaaaatggtttcccttaaggaaactgttttgttactttggagttccggcccccaaagtaaatttt

SEQ ID NO: 606 - DNA, 221 bp, Black grass varicosavirus-like virus
  source 1..221: mol_type = other DNA
taagttgttagtttccgtttgatgaagatggccagcagggtagaagaaaaaactatcaaacttggatacaagcagcagatcttatataaaacatagtatcattcgtaattattgcaccagagatgaatctaaatggcgaccctgtgacctatagcgtcattgataacgcggtcagattgcacgtggaacgcagcacgtatgggtttatgtttgaggcatgt

SEQ ID NO: 607 - DNA, 303 bp, Maize suscal virus
  source 1..303: mol_type = other DNA
gggcttatcgctcgcagggactaataaaaagtgagtatgtgtaagctgagccaaagactgtatcgccagttttatctaaaagtttattgtgaacttaatttaaagttcctatctgttcccatttaataccattaagaatgtggtcccagctcacctcttgtctagtccaattaagctgcagattgtgttgggtatgacataggacatatgggagtgacaaagttgaggtaataggagaataaaagtggaatcgacagtagtatcggcttgtacaacgttgagcgagacgcaaactcactcctg

SEQ ID NO: 608 - protein, 1615 aa, Tomato brown rugose fruit virus
MAYTQTATTSALLDTVRGNNTLVNDLAKRRLYDTAVDEFNARDRRPKVNFSKVISEEQTLIATRAYPEFQITFYNTQNAVHSLAGGLRSLELEYLMMQIPYGSLTYDIGGNFASHLFKGRAYVHCCMPNLDVRDIMRHEGQKDSIELYLSRLERGNKVVPNFQKEAFDRYAETPDEVVCHSTFQTCTHQQVENTGRVYAIALHSIYDIPADEFGAALLRKNVHVCYAAFHFSENLLLEDSHVNLDEINACFSRDGDKLTFSFASESTLNYCHSYSNILKYVCKTYFPASNREVYMKEFLVTRVNTWFCKFSRIDTFLLYKGVAHKGVNSEQFYSAMEDAWHYKKTLAMCNSERILLEDSSSVNYWFPKMRDMVIVPLFDISLDTSKRTRKEVLVSKDFVFTVLNHIRTYQAKALTYSNVLSFVESIRSRVIINGVTARSEWDVDKSLLQSLSMTFFLHTKLAVLKDELLISKFSLGPKSVSQHVWDEISLAFGNAFPSIKERLLNRKLIKVSGDALEIRVPDLYVTFHDRLVTEYKTSVDMPVLDIRKRMEETEVMYNALSELSVLKESDKFDVDVFSRMCQTLEVDPMTAAKVIVAVMSNESGLTLTFEQPTEANVALALKDSEKASEGALVVTSRDVEEPSMKGSMARGELQLAGLSGDQPESSYTRNEEIESLEQFHMATASSLIRKQMSSIVYTGPIKVQQMKNFIDSLVASLSAAVSNLVKILKDTAAIDLETRQKFGVLDVATKRWLIKPLAKNHAWGVIETHARKYHVALLEYDEHGVVTCDSWRRVAVSSESMVYSDMAKLRTLRRLLRDGEPHVSSAKVVLVDGVPGCGKTKEILSKVNFEEDLILVPGKQAAEMIKRRANASGIIQATRDNVRTVDSFIMNYGKGTRCQFKRLFIDEGLMLHTGCVNFLVSMSLCEIAYVYGDTQQIPYINRVSGFPYPAHFAKIEVDEVETRRTTLRCPADITHYLNRRYEGYVMCTSSVKKSVSQEMVSGAAMINPVSKPLNGKVLTFTQSDKEALLSRGYTDVHTVHEVQGETYADVSLVRLTPTPVSIIAGDSPHVLVALSRHTQTLKYYTVVMDPLVSIIRDLEKLSSYLLDMYKVDAGTQXQLQVDSVFKGSNLFVAAPKTGDISDMQFYYDKCLPGNSTMLNNYDAVTMRLTDISLNVKDCILDFSKSVAAPKDPIKPLIPMVRTAAEMPRQTGLLENLVAMIKRNFNSPELSGIIDIENTASLVVDKFFDSYLLKEKRKPNKNVSLFCRESLNRWLEKQEQVTIGQLADFDFVDLPAVDQYRHMIKAQPKQKLDTSIQSEYPALQTIVYHSKKINAIFGPLFSELTRQMLESIDSSKFLFFTRKTPAQIEDFFGDLDSHVPMDILELDISKYDKSQNEFHCAVEYEIWRRLGLEDFLGEVWKQGHRKTTLKDYTAGIKTCLWYQRKSGDVTTFIGNTVIIAACLASMLPMEKIIKGAFCGDDSLLYFPKGCEFPDIQHTANLMWNFEAKLFRKQYGYFCGRYVIHHDRGCIVYYDPLKLISKLGAKHIKDWDHLEEFRRSLCDVANSLNNCAYYTQLDDAVSEVHKTAPPGSFVYKSLVKYLSDKVLFRSLFIDGSC

SEQ ID NO: 609 - protein, 3640 aa, Celery latent virus
MSKRIYTIIVVLCFQVCFQNLRTQPTQSSHTFSTNPAIPGTDALQFEENANLTYSTIKYNILKFNLNYKQSIMSVVSFGSITSMDFDAACLAAMIETPGGSIPPTPQSPPTSPVAVKQRKILNFPIAKIRTTPDASFEMCVKFPESFIDSFCAQAQKELKYWHAAITQLKFFGGETPKTLETLVNQGQAHTHQVILNLVKILDSAPKAIQGKKELENFFQLSPHGNNSKEPIDVSRKVYMEPCKISPRKRQVCSCDNDDDAHYHCYYCDIVCSSKNLLQEHERDFCEDAQSVQAFGYKLESPNVFDPPHVTQQRSVAPSLGKTLESPVKSPEQSKPNLEKSFPLVESSTNSGMIFFGSIATMVPSHIEKYVRNCETENPIDAAASNLAMQEAKSSGAPCIVVHHKALPGGKKDFLFPHNSPQVVRTETEEPIAGTIDRPTIKRALFTRIKKKAQEICVNPGGTIQRKTKRWLRPAEVAQIVRATSDPQHPLFKVDVTQIIEVVHPVYRTERTEVVQQCITRGTYKLMSKAQQRKARAMRSAGMLVITDNPTTHWVSEPQKMLVVKEKLSTTKHVKLRNVEVNAESEMFWGTKTKEGPSKTALKRCKRNIDRLALLDPQMGESANGECWMNTFKHHLKVGSIDILPNKVRLPNLRSAFSRWIPLVDYVEILKFHCKSQPKLKRVVIPTPVTYLEGSRYHIHVGYSKNCSWITVEQLIRQLQTLLTSSKYGEHFKRAIVGGEPEDKFTPVVPIVDVETERAKSSLAKWTTAQQRYMGSIRTRINSQAEKHKIDSEKKIWIPMRHDTMDMLTPPYLFENGLRNNEVQQVGQVLGDSVDRAGNSSGQSSQCQQQNVALASEGNNDNVINESVRSIQNLVTANMQLQEQCKLLLASHEQAIMDSVEHGNLEIQKHDVEVSQKPSTRKSDSQRNLQKFSLKKIVASEEMSRTLGRGWRKSVTSIGVPIVSASIAEALNQVVQRGNTSWLDVGISGTLLKQCTLFATRTFQAYCSYKLARNVLTLTVGELYDNVKSYINSIMGSTDPEVTGFLSQVRSAPSMVKMAILLTMFAISVKLMRKFFKVKNNGTSFTVSGENVSASQLRISAQAQARSTDNMTPTVKKLCSILGMIGLVCCCYDRTTWAYQKDWMDAWITSITYAGASDSIWESISHPFETLHNIAVSGGDRSPETTARLERILAGAGLNAQAQALDEFGASSSVMGQTLQNILDEVESTNVSIVSEMKALPHYHRNATTFNQAARDLVTEPDATYQMLLTAATGTGKSTLFPVHLRSQSQKRVLLLIPLVAATHGVYQRLKSQRVNDIGYHADSISENPNAKLIISTYGHMCVKLLGGQNPFDQFDYILADECHVVTLETVTVISHLLQQREMATWKTVFMTATPFNNITLNSVETEQPVIMQQTEHFHNPKSFVDFLKAGGTERVQTYAKGGCIVFCSTQKETEESAKALKASGVIALFYHASNRLEWDSFAKKNERSMGQLNFYLFATNALESGVTIPMKSCVDFVTKMHPVVGGDRKTITMAPTSISIQEQLQRRGRVGRTCPGGYLYTSVGTPLMYKLDPDSSIKYLLYCWKSGIKCYKEALNIPDECTITFTKEKIGAIWTHDTPPVVTAALVDNFGAVYRNANFFLASHRRNYVEIPHTTDMILPSTLSTWENFELDGNEVSDGTRMRVPQNHFFFRNERVQESWLKLQAAILTELTEAEATKKRDIVIENLMARRVSGHPASKLEIARMIMAKQQVVQQARDTKRVRETLSESISDYSGIFSNFSGIFSVQERLKKASIKANEELDMVIQENESHILFLQDMIKETPEIIPDMALEEQIQHMEYAKAILENGWISGNPQAKLLIMRTTHKNFHDLVTKTKDGTYRMKSYVQRMFDFVKKHPLLIFMSIMMGTSLAAGYFMMSKDSEDDDAIVQDKVFKRNDKAMLEWCLRGKACKCDATHFEAQYVLDSRHYRTILEDWVKFPLRGFHNIQIVNYGTVSKYARALAFLSVCALLANPTMVYNSAAHSMAGNSEYNESVAKSLMHNILRDWNRVPLIDLLVKGIDGSDDRYDQYIHELYTSGGLIAFESDTGKFEGKMSISQYRKDAAKGQTKRSAASRSREEDHYDPRSSGRLKSGIRRAYRQFYNIEDSDVQEIILTNKKGAPILKIGSLDELNQHVDLLKFSDPELYELYLHARDKLDLDEPESSSGFTGKWGDYAEDDEFMKMISALDSLTKQASEEAFIPVQVKLRDGRTVQANVARYWQKDYPTGKSVKQWAQTTWAPPQFTALRERVGKALELIPESRPIHLHGKVPNGTLIEFQDAMKDLHEKTAVKAVAEAKIGDTQFEADPSDVTSRVGVVMVKTSANAEWESWNQCVALNNIVIFPHHYTLKDGNNLRFKFSSSDFESTCHIVDGYNGLDMAWAPINVKIRGLKKKVCLGTPRNGSYLWHFSMINQGKDLPEARLMGYSSVTKVQEESHPSFDWTHTVSTQVGNCGGPFVDKHGVIVGYHTGAFQLGQFNTFLGLSAPLIAHLTKLDVKPSAQPQSKMIWREVDFYRSPNYLPPTINNQEPIPEEWRYPEGKSVYPCVDPGWMGSRLVKGSGFRLIGKMQRHVEYSTKISLNEHFDMWMSQEKTQNELTRLNKNRVEKGLEKAFISHTIAAQNKEAAIKDTSKYARTTLGTYSEPLLKRATALTIQMLEEHIKLCKRQPLDLVYGDMEWNTACGAQYNGLKSAFRDQVVGIENMDAYGQYCWERFNVPTDQYKPCIWTNSLKDELRPIEKVKENKTRTFTAAPIEFVIGAKQAVDAFNHQFMDAHLKLPHTVGINQWSGGWHKLYKKLYGKNFVYSSGDGSRFDSSPCFYMFDALYTIRTYFADPEIHQVLENIYLEVCHTPIVLHDGNVVMKNHGNNSGQCSTVVDNSLIMMILCCASYLEHTPATMHSLDAIKSHWHFCVNGDDYIGGMSPLLASHLTKEKMAKTFSDFQFIYEWSDYSPSLFEQDYMSLKFINIVERKGQTTGQQLIAPWREASRQLSTLAHTSSGAPEIKLQVALTERVKAWVDKDLFDFITEYCRWLVEYFDRFTNTQAWNEAKKLWWDEQQIFNHYFSFESICNAPYSQIVNETPDEFFANGVRESRPLRILRDGIKFGVAVTAANYLGPSDHDVPMIANTMLNVAKIGLANSTAERIDRMLFGKENPEHSRADSLVVVKTEQTDATICLRTHCKCQAQHFDGKYECWVSSPSVAIKMFATLKPRILSTTKFVGVKFLPKILRAHVWALYLSGFSWEETMQIVQSHYPGEKQQRKADWFLQQLLKELVLIFKVKGSKFIELGEHAQVQGKTQLDSTQVDMDPNFNAAAYAATLRGGPHWGTHNSQGLFDAIKVLNPNAANVDIGNARTAVQREMQRLIAADAPRQQPPPQVGGGHQQPPPAGGQTQGQPGGYTPSQAFTNKFGNIMAEPDAPLVLDSQATMREVAQIEAAWARLLEVQSLEGLGSFWNYMFSYVGNNGTSSGGDPRDYIPAGNGRVTLAQLKSKAQGEQWRRYWRSHASDMRDFLRLLQASDRPLPIRWARNNGIKDANYEIAFDFADALPDLSAAQMSIILAAKNLAVRRGQGQMLNAGTKVGGRSRTETYDQAVRDAADVQFPGA

SEQ ID NO: 610 - protein, 2031 aa, Black grass varicosavirus-like virus
MDTLEHAEANELEDDDYFLPDEGPLHDMHLASAINLDQIQELMYPGTIKYKIDIPYYLRDEYMLIESLCKGDKIKMELGMLAPSLKLSKPGGELSTMDLPAYKEIGNLVCQALRNRDIMIPISMNDVALKLPGVIVYRSWGIAFAELLKIICTRAEVMRGGSQPVYQGTGIEAGAAHCQFQVNGNWYQIVARKNLSTLYDRQENVMYIGNIHSLLLLMDTIGQRICLMVANQIAELYDTPGWVDQGKIDQILSTGDDILEEMGNDGYETIAMFESLVIGKVLRATPDDITECHKFLYNCMDEVENMLLNSAMRGRIIELVHRWLAIFDSLSIKELSNVFCLYRCWGHPVVNIYEGMEKVYDIGTEEKEVSPWVATDILCQFRKTFLINYYEKHHYYPNVLISEEVENSYVAQCIKKGSSIEEMYPTYDTKDFLGIEIQKIWDIPITFDLCHILNDKAVSPNQKELTDSVVRYQNTTGGQNRRGLLRWLRGKSLNCREFLREIDQNGLPEDECIIGMYEKEREIKIKARMFSLMSERMRYYFVLTEDLIAKHVLELFPAITMKDSQNVLQKKFWTVGGMGKDSTFDVNINIDFSKWNSNMRNELTQPMFQQLDKIFGYTNLISRTHEIFESSFVYSSSGKYVPTVKFGKLQEDPPMAYRGHKGGFEGLRQKGWTVATVCALSAIAERRNVRTKLMGQGDNQIVRILMPTQRWKSNELTIKEMIQNAKQIQKAFVTDMERTFEEAKLPIKVRETWASTRLFMYGKMILHDGDAMPQWFKKVLRSYALTNEGQVTVAGVVGTIATNMASAAGLSEMPDVMYLIFVAMTEWSLGYLLEYHPFTRKCILREHEYHVKIPGAHRGRDYRVRSVNKRRLVVSMILIPTAAGGSVTVPLPGFIMRGFPDHASEAYAWIKMLAEVKSPYKTMLKNWYTFIGNDSIQPDMLIQSPSSINFLKPPTPSFQGRMNVRELLLSGEFDQNQFIKEAGTILGVFDRKKVCSAMLTDPMNPFITSEVYSTYAHVYIDGVIKRVENTSTIKKLAQKVKTKTQVIKAMMYNEHNFIMFISWRAMKRGTIDYDCATQQARMARNIGWGRTITGVTTPHPVELGIGHICKGRQDECPPTDYIYVRINEKGEFVPYLGSRIKCKVVSEQDIDARREPLIAVGSRICRYSSWLGIGPNLMEIVEKNLAVVCDTSVYDKFIDDDPKGLLSSGSIDHRFTPAGASEGVFINYAPQIGCNVYMSSDCMPTYGRGQTNYTLHFQALYCWLQYISSRRAESVFMHHHIECEDCVVPTTDEVPDIQCPFPYFDNIYPPRVRDSISRALGFIDRKGGLDIMSNVRSLCHEAEPGMFDVRQLQKGVMWTLAIKIGFRLYHGGLFGSDDTRVEDLQEYPRIYSYKLYRDTLLVNVAHVMMMLAAIEMDKAPDGEELAKVRRRATDKLLSKPIGSFKGLGGLTLGRTDENPDNSHLFMTGSFPETVFSILNTSKTALIETIGQIGRLSIEGMGHLPVAKGSLSNKQFRFLIMMRCLLECRNSHYFQHFQKIPEDEPGHPADPQNDVYRMLVKTPVLDMSLDKMVKSLAVINERKTLPIIEWNNISFESTEVICRTGTPRSIFIGNRMIVEQNSRREYREVTLPTSSIYKWAGILFHKPLKRHIIVLGDGTGGTSLLVKTFNQDSTVYPCSYLETHKIIPQDMECLMPQLSRGYEGISGRVLLNVPDDIKDPLWSERMSSEINDMGVERTSIVCDIETVGLCVLLDAFRSLPQGVQVVMKTYAKDILTNIMSIMGLNQVEVGFSPHLNQSNHEVFLMGHISQNSFPDPDMMINQMVKLYGKVRADPRSRILEEMRMINKVFKPLKNTSVSLSLAHINNLGITMTREILQLDGLEIWGYALQFVNRHYVDPSHRAFLADKKTMNRKRKRDLTRAFRILLGVVVNPGYLDIKRKWGIRTPKEFKPRGMNLILARDCDDMGVKLTKKDKLASECLHCFWTRKMRKAPLDAPDPPGEDWMESATRVRSFASSLSEHSSHDYINVIETE

SEQ ID NO: 611 - protein, 2338 aa, Maize suscal virus
METFLDEQFDDMLSEFEQARLSRFPASHHSSALTYYPQRHILSLMSPNCPVKPTPLLRAYCDAVNKVSDLLGGGCDATDNPAPVYSYIFSQTTASSPAYYDPDYEDPYLLDSLRAASDAVLEDIEAIESHHPGFSLDNQKLRLLRKVSSRLHASCKQIFAVRRMLEKVRNQIQKCHIGVDHKLMPAVRLGNLSIHTVRDLIFVAGLQPFPMRIHILNYDQWLMIYDTVCCRAMVKVATLWNEELRTDNIPSWEIVSSVYKWGDALLTNYGVSAYAIIGEFESIVTGVLITFSDTDTLGLGASFVNSIMENAQEQSRAYNIPANETLKLISLLRTVESVNWLSELFGLRKHWGNPMVDARASGKAVQEKVDEVLPVKGTALVKLLASFNRMVTLSFISQHGQWPDGYYLSNSRDCPLKRAFESRSTRIPETVEGHRHEDWACFVFLPNCILDSYEDDLALISDKAVSVYREHLDSVYVRALCNKQSQGTVEEDRRLMLEYLRKQHMPILDIFKIVMTDAVPPRWMANCASMKGTEMKHLKARIFAVLTYEMRQYFAASEDILKNNLFKYNPHQTMTMSETELLTRLKSLTTQLDPNSQSRQLSVIHIVDFSKWNLRMRYTNTCLVFKSIDDFLGTPGLFENSHPLFSDMLNMVSDPFNPPALGVEETESDTIWRNHHAGWEGQRQKGWTILTSALLSDLERTTGVHSEICGQGDNQALLSKFPVPTIYRNPEEWIKSDPTEVRKVLDDFYLRLEKECEAVGLKIKTAETCRSLCFFNYGKRLYFKGSELSMTLKRFSKNITQPNDSYPTTEAILKTYEGSSYAAGLYSHPSLLPYWMSKFSVAHQLFNSFTNNQLCAEAPVQMMSTFGFPINYRLISTLMKIPASLGGPPQQCLADYLLRGHPDPLCTDLVGLTLKSKAGCVISKKIIRLAQSGKWFSQRTLTRDSLIKSPYSLNLRVPLSVRQPIEEAVLPAVRAHCNNNLVKSLFDSSMDDDERYILDSLGLMKPFHPLVANDIYSRTLPGRRQMFISGLANTTSLGRLIKGNSAFPLIYKVMDLEMEQLKSWIVQLTELLGLPDNDDIILPHHILAQQLREKSWNTVIEGITVPHPLEQFMLTLSKSDVCTNDCYTVEPEHIVLVQHSEDVVVSPGVDRDHITAARSKKGSPYLGSHIGEGIVQKQLICLNPDTSWRDVIRLNTIKRWVAPEGSRLRLFMNGIISSRTNISRAYIDLATGVPSRLSYNHRASLMGSINSCSISSTTNMHTRLYLSSNRMGDYSHGLKNYHMPFGPTFLCYQTLVCLIGIFSPEKWAFPRNVYHIHVRDSRVPPVYDGGLELEDLTVLDLKGHPPTILRCLASKLVFEAAPGYASFGFWCEFETASRTDAKYGYAQQLTGGLFIQETVVRESITHDRIGSFASRPAVISIGDISLIEPSLFLRSIAWGMLLLAPMHLLHFRGKYAFKVSCVEYVNLFSRAFWSSFESPMSNPRIIRKLGKHVALMSSHSLGRLDSGIIPALQIIIVEEMWCIIHSIATYFRRGGDKPNIPPIFAPSGSAALLLTSRVIEMMVTIRLVVGNCSISKIVGFPRDFSANLMSVPQPISAAALIVIQHDFLELQRHLKLPLRDMVIPRVFSTHYPWVDILRKTDSVEADDEDPQRQLVLPVDFPQCANVVEFRIPENPVLETTPQCDCKTTQRKRDLHDECFFSLSGNYSKSHLKILELIFSFHLPIANLCVLGSGTGSEACALSNYLDCRQVYVNCYHKLTDFSPHAASTYVPPAFRSDGIVTKLVSPASAVLSLSDLTDIRTADAIYQHLRGIATTGIICDAEIPSAATPLLYSQIMHTIVAVVRKKASINWVLIKVPIFCVHKLLGLAAPLAQAFHRIIFAYPDFGKPHSSLVYIVATIRAKATPIEENRLPTVMLEDEMLREMLASISSQNHCRLYEMRVADRISRLSLNLTLPQSLTVASNRFVQGLILTEDEISDPEQVIKVLKAVRQGLLTSAQKVVETHFRVHNEITMPRSAVLSADLGTLHGQLNNTYLKVAKCDLLLELLHLIHPTLEQIKNRVYSWLATAHSYRMRNRNFNVYINQTRFISHDSRYLFEILGHLMKRSVPTVGLPIHMDYHLFGSRTLRPKQLIVPCPIGVCRSPSGRTSKWKWQKRSEILGWAISLTLTNLPIAVEDHNSFSLDFLHEKGILEDVRMMASLNPSRIEVPYFFRPNEMALDLLAHDRLFLVAPLNSFSLLRSRYTTVEPYFVPWSGAPLAWCLFYLEERNQIDSLIVDEICLDDTLSVNTYVDTDSMSCRCLSCKTEEVLGERFSLNTNDLDFLCSLGSIETVYDSEHAL

SEQ ID NO: 612 - DNA, 4845 bp, Tomato brown rugose fruit virus
  source 1..4845: mol_type = other DNA
atggcatacacacagacagctaccacatccgctttgctcgacactgtccgaggtaacaataccttggtcaacgatcttgcgaagcggcgtctttatgacacagcggtcgacgagttcaacgctcgtgatcgcaggcccaaagtaaatttttccaaagtaataagtgaggaacagacgcttattgctactagggcatatccagaattccagataaccttctataatacgcagaacgccgtgcattcgcttgccggtggactacgatccttagaactggaatatctaatgatgcagatcccgtacggatcactcacatatgatataggtgggaattttgcatctcatctgttcaaaggacgggcatatgttcactgctgtatgcccaatcttgatgtccgcgacataatgcggcacgaaggccagaaagacagtatagaattatacctttccaggcttgagcggggcaacaaagttgtcccaaatttccaaaaggaagcttttgacagatacgctgaaacgccagacgaagttgtctgtcacagtaccttccaaacgtgtacgcaccagcaggtggaaaacacaggcagggtgtatgctattgcattgcacagtatatacgatatacctgctgatgaattcggagcggcacttttaaggaaaaatgtccatgtttgttacgccgccttccacttttccgagaatttacttctcgaagattcacacgtcaaccttgacgaaatcaacgcgtgtttttcgcgtgatggagacaagctgactttttctttcgcatctgagagcactttaaattattgtcatagttattctaatattttaaaatacgtgtgcaaaacttacttcccggcatctaatagagaggtctacatgaaggagtttttggtcaccagggttaacacctggttttgtaagttttctaggatagatacttttttattatacaagggggtagcccacaaaggtgtaaatagtgagcaattttacagcgcaatggaagatgcatggcactacaaaaagactcttgcaatgtgtaacagcgagaggattcttcttgaagattcctcatcggtcaattactggttcccaaaaatgagagatatggtcatagttcctctattcgacatatctctcgacaccagtaaaaggacccgcaaagaagtcttagtgtcaaaggattttgtattcacagttttaaatcacattcgcacttatcaagccaaggcacttacatactccaatgttttatcctttgtcgaatcaattcgttcaagggtaattatcaacggagtgactgccaggtctgagtgggatgttgacaaatctcttttgcaatccttgtccatgacatttttcttgcatactaagcttgccgttttaaaagacgaattgttaatcagcaagtttagtttggggccaaaatcagtaagccagcatgtatgggatgagatttccctggcttttggaaacgcatttccatcgatcaaggagagactgctaaatcggaaactaattaaagtgtcgggagacgcattagaaatcagggtgcctgatttatatgtgacttttcacgatagattagtgactgagtacaaaacatcggtggatatgccagtgcttgatatcagaaagagaatggaggagactgaggttatgtacaatgcattgtctgagctatctgtgctcaaggagtcggacaagttcgacgttgatgttttttcccggatgtgccagactttggaggtagacccaatgactgcagcaaaggttattgtggcagtgatgagcaacgagagcggactgactcttacattcgaacagccaactgaagcaaatgtcgcattggcacttaaagattcagaaaaagcctctgagggtgcactagtggttacttctagagatgttgaagaaccatccatgaagggttcaatggcaagaggagagttacaattggccggtctgtctggagaccaaccagagtcttcctatactcggaacgaggaaatagagtcattagagcaattccacatggcaacggctagttcgttaattcggaaacagatgagttcgattgtgtacacgggccccattaaagttcagcaaatgaaaaactttattgatagcctggtagcatcactctctgctgcggtgtcgaacctagtcaagatcctaaaggatacagctgctatagatctcgaaacccgtcagaagtttggagtcttagatgttgcgaccaaaagatggttaattaaacctttagccaagaatcacgcatggggcgttattgaaacacatgctaggaagtaccacgttgcacttttggagtatgatgagcatggagtggtaacttgcgacagttggagaagggtggccgtgagttctgagtcaatggtttattctgatatggcaaagctcagaacactgaggagattattaagagatggtgagcctcatgtcagcagtgctaaagtcgtcctagttgacggtgtcccgggttgtggaaagacaaaagagattctctcgaaagtaaattttgaggaagatctaatcttagtaccgggtaagcaggctgctgaaatgataaagaggcgtgctaatgcgtcaggaataattcaagccacaagagataatgttcgtactgttgattcatttataatgaattacggtaaaggaacacgctgtcagttcaaaaggttatttatcgacgaaggtctgatgttgcacactggttgtgtgaattttcttgtttctatgtctctgtgcgaaattgcatatgtttatggagacacacaacaaattccatacatcaacagagtatccggttttccgtaccctgcacattttgcaaaaatagaggttgatgaggtggaaactcgcagaactacgctgcgttgtccagccgacattacccactatcttaacagaaggtacgaaggatatgtcatgtgtacatcgtcggttaaaaagtcagtttctcaggaaatggtgagcggggccgcaatgatcaatcctgtatctaagccattgaatgggaaagttttgactttcactcagtctgataaagaggcgctgctttctcgaggatatacggacgtccatacagtacatgaggtacaaggtgagacatatgcagatgtgtcgttggtcagattgactccgacacctgtatctatcatcgcaggagatagtccgcacgttctcgtagctttgtcaaggcatacccaaacattgaagtattacaccgtagtgatggatcctcttgtaagtataattagggatttagaaaaacttagttcttacttgttagatatgtataaagtagatgcagggacccaacaattacaggtagactccgtgtttaaaggttctaatctttttgttgcagcaccaaagactggagatatctcagatatgcaattttactatgataagtgtctcccaggtaatagcaccatgttaaataactatgatgctgttaccatgaggttgactgacatttctcttaatgtcaaagattgcatattggatttctctaagtctgtggctgcaccgaaggatccgatcaaaccactgattccgatggtacgaacggcggcagaaatgccacgccagactggactattggaaaatttggtggcgatgatcaaaagaaactttaattcaccggagttatcaggaataatcgacattgagaatactgcatctttagtagtagataaattttttgatagttacttgcttaaagaaaaaagaaaaccaaataaaaatgtttctttattttgtagagagtctctcaatagatggttagagaagcaggagcaagtgaccattggtcagcttgcagattttgattttgtggatcttcctgccgttgatcagtacaggcatatgattaaagcgcaacctaagcagaagctggatacatcaattcaaagcgaatatccggccttgcagacgattgtgtatcattcgaaaaagatcaacgcaatcttcggtcctttgttcagtgagctcacaaggcaaatgctcgaaagcatagactcaagtaagtttttgttctttacaaggaagacgccagctcaaattgaggatttcttcggagatctcgatagccatgtccctatggatatcttggagttggatatttcgaagtatgacaaatctcagaacgagttccactgtgcagtagagtatgaaatatggagaagacttggattagaagattttctgggagaagtttggaaacaaggccacaggaaaactactcttaaagattacacagctggtattaaaacgtgtttatggtaccagagaaagagtggggacgttacaacattcatcggtaatacggtgattattgctgcttgtttagcttccatgttgcccatggagaaaataatcaaaggtgcattttgcggagatgacagtttactatacttcccaaaaggttgtgagtttcctgacatacagcatacagccaaccttatgtggaatttcgaggctaagctattcagaaagcagtatggttatttctgtggaaggtacgtgatacatcatgacagagggtgtattgtttattatgaccctttgaagttgatttctaaacttggtgctaaacacatcaaggattgggatcacttagaagagttcagaagatccctttgtgatgttgcaaattcgttgaacaactgtgcgtattacacgcagttggacgacgctgtgagtgaggtccataaaaccgcacccccgggttcgtttgtatataaaagtttagttaaatatctgtccgataaggttctttttagaagtttgtttatagatggctcttgttaa

SEQ ID NO: 613 - DNA, 10923 bp, Celery latent virus
  source 1..10923: mol_type = other DNA
atgagcaagagaatatatacgattattgttgttttgtgctttcaggtttgctttcaaaatctccgaacacagcctacacaatcttcacataccttctcaacaaatccggcgatccccggtaccgacgctcttcaatttgaagaaaacgcaaacttaacttactctaccataaaatacaatattttaaagtttaatttaaattacaaacaatcaatcatgtctgtggtctctttcgggtcaatcacgagcatggacttcgatgctgcatgtctagcagctatgatcgaaacccctggtggctctattccaccaactccacaatcaccacccacttcaccagtggcggtgaaacaaaggaaaattttaaattttccaattgccaaaatcaggacaactcctgatgcatcttttgagatgtgtgtgaagttccccgagagcttcattgattccttctgtgctcaagcacagaaagaattaaaatattggcacgctgctattacgcagttgaaattctttggtggtgagacaccaaagactcttgaaaccttggtgaaccaaggtcaagctcacactcaccaagttattttaaacttggttaaaatccttgatagtgctccaaaagcaattcaaggaaagaaggagttggaaaatttcttccagctgagcccacatggaaacaattccaaagaaccaattgacgttagtcgaaaggtttatatggaaccgtgcaaaataagtccacgcaagcgacaagtgtgctcctgtgacaatgacgatgatgcacattatcattgttactattgtgatattgtgtgttcaagcaaaaatctattgcaagaacacgaaagggatttttgcgaggatgcacagtcagtgcaagcatttgggtataaacttgagagtccaaatgtctttgacccaccccatgtgacgcagcaaaggagtgttgcaccatctttgggaaaaactttggaatctcctgtgaaatctccagagcagtcaaagccaaacctggagaaaagtttcccactagtggaatcttccaccaacagtggcatgatcttctttggatcaatagctaccatggttccgtctcatattgaaaaatatgtgaggaattgtgaaactgagaatccgattgatgcagctgcatcaaatttggcgatgcaagaagctaaaagctctggcgctccttgtatagtagtgcatcataaggcactaccaggtggaaagaaagattttctttttcctcataactctcctcaagttgtgagaactgaaaccgaagagccaattgctggtaccattgatagaccaacaataaaacgtgctttatttacccgcattaagaagaaagcacaagaaatttgtgtgaacccagggggaaccatccagagaaaaacaaagcgatggttgcggccagcggaagttgcacaaattgtgcgagctacctctgatccacaacatccattgttcaaggtggacgttactcaaattattgaagttgttcatcctgtttataggactgaaagaactgaagttgtgcagcaatgcataacaaggggaacgtacaaattgatgtctaaagcccaacaacggaaggcacgagcaatgcgctcagctggaatgttagtgatcactgataacccaacaacgcattgggtatctgaacctcagaaaatgctagtggtaaaggaaaaactgagcacaacaaagcatgtgaaactccggaatgttgaagtgaatgctgaatctgaaatgttttggggaactaaaacaaaggagggaccctcgaaaacagccttaaagcgctgtaagcgtaacatcgatcgcttggctcttcttgatccgcaaatgggtgagtctgcgaatggtgaatgttggatgaacacctttaagcaccatttaaaagtggggagcattgatattcttccaaataaggttcgtttaccaaaccttaggtcggcattctcacgatggatacctttggttgattatgttgaaattttgaaatttcattgtaagtcacaaccaaagcttaaaagggttgtgatacctactccagttacttatctggaaggttctagatatcacattcatgttggttatagcaagaactgctcatggattacggtcgaacaactaattaggcaattgcagactctgttaacatcatccaaatatggagaacattttaagagagcaattgttggtggtgaaccggaagacaaattcacaccagtggttcctatagttgacgtggaaactgagagagctaaatctagcttggcaaaatggacaactgcgcaacagagatatatgggatctattagaacccgaatcaactcacaagcagaaaaacataaaatcgattcggaaaaaaagatctggataccaatgaggcacgacacgatggatatgttaactccaccatatcttttcgaaaatgggctgagaaacaacgaagttcaacaagtcggccaggttcttggagattctgtagatcgtgctggaaacagttcaggtcagagttctcaatgccaacaacaaaatgtggcgcttgcatccgaaggaaacaacgacaacgtgataaacgagagcgtgcgcagcattcaaaacttagttactgccaatatgcagttgcaagagcaatgcaaattgttgctcgcctcacacgaacaagctatcatggactccgtagaacacggaaacttggagattcagaagcacgatgtagaggtctcgcagaaaccatcaacgaggaaaagcgactcacagaggaatttgcaaaaattctcattgaagaaaatagtcgcctcagaagagatgtcgagaacattgggcagaggatggagaaaatctgtcacctcaatcggtgttccaattgtgagtgcttccattgcagaagctttaaatcaagtcgttcaaaggggaaatacttcctggcttgatgtaggcatttctggaacattgttgaagcaatgtactctttttgctacgagaacttttcaagcgtattgtagctacaaattagcacgaaacgtgctgacattaaccgtgggagaattgtatgataatgtgaaatcatacatcaactctataatgggttccacagatcctgaagtgactggtttcttgtcgcaagtacgtagcgcaccttcaatggtgaagatggccattttgctcacaatgtttgctatctcggtgaaattaatgagaaaattcttcaaggtgaagaataatggaactagctttactgtaagcggagagaatgtctctgcaagccagttgcgaatctcagcacaggctcaagctcgatcaactgacaacatgaccccaactgtaaagaagctttgtagcattcttggaatgattggtttggtttgttgttgttacgatagaacaacatgggcatatcaaaaggattggatggatgcttggatcacaagtatcacatatgccggtgcatctgatagtatttgggaatcaatttcccatccatttgaaacattgcataacattgcagtgagtggaggagatcgttcaccagaaactacagctcgtttggagcgaattttggctggtgcagggttgaacgcacaagcccaagcacttgatgaatttggagcgtctagctcagtgatgggtcagacactgcaaaacatattggatgaggttgaaagtacaaatgtgtcaatcgttagtgaaatgaaagcattgccacactaccaccgaaatgccactaccttcaatcaagcggctcgtgatttagtgactgaaccagatgcaacatatcaaatgttgttaacagcagcaactggtactggaaaatcaacgcttttcccagtgcacctaaggtcacaatctcaaaagagagtcttgctgctcattcctctcgttgcagcaacacatggagtttaccagcgacttaaaagtcaaagggtgaatgatattggttaccatgctgattcaatatctgaaaacccaaatgctaaattaatcatctcaacatatggacacatgtgtgtgaaattacttggtggtcaaaacccttttgatcaatttgattatattttagctgatgaatgtcatgttgtaacactcgagactgttacagtgatatcccatttactccaacagcgagaaatggcgacgtggaaaacagttttcatgacagcaacaccattcaacaatatcacacttaatagtgttgagacagaacagcctgtaatcatgcaacagaccgagcatttccacaaccccaaaagctttgtagattttctaaaagctggcggcactgaaagagtgcaaacatatgctaagggaggctgcatcgtattctgttctacccaaaaagaaactgaggaatcagcgaaagctcttaaagcgagtggggttattgcactcttttaccatgcctctaaccgattggaatgggattcctttgcaaagaaaaatgagcgaagcatgggacaattaaatttttatctctttgctacaaatgcactagaatctggtgtgacgatccctatgaaaagttgcgttgattttgtaactaaaatgcatccagtagttggtggagataggaagactattactatggctccaacttcaattagcattcaagagcaattgcagcgtcgaggtcgagttggacgaacttgtccaggtgggtatctatacacatcagttggaaccccgttgatgtataaacttgacccagattcatccattaagtacttgttgtactgttggaagagtggtatcaaatgttataaggaagcattaaatattcctgatgaatgcacgataacattcactaaagagaaaattggtgctatttggacacatgacacaccgccagttgttacagcagccttagtggataattttggtgcagtttacaggaatgcaaacttcttcttagcatcacatcgaagaaattatgtggaaattccacatacaactgatatgattctgccctcaactctctcgacatgggagaattttgaattggatgggaatgaagtatcagatggcacacgaatgagagtaccacaaaatcatttctttttccgaaacgaaagggtccaagagagttggttgaaattgcaagctgcaattcttactgaactaactgaagcagaagccactaagaagcgagatatagttatcgagaatctgatggcgcgtcgagtatcgggccatcctgcttcgaagcttgaaatagctagaatgataatggccaaacaacaagtggtacaacaagcaagagacacgaaacgtgttcgagaaacccttagtgagagtatatctgattactccggcatcttctcaaacttttctggaatattttcagttcaagaaagattgaaaaaggcttctatcaaggctaatgaggaattagatatggttattcaggaaaatgaatcccatattttatttctacaagacatgataaaagaaactcctgagatcatccctgatatggctttagaggagcagatccaacatatggaatatgcaaaagccatattggaaaatggttggatcagtgggaatcctcaagcaaagcttctcattatgcgcacaacgcataaaaattttcatgatcttgttacaaaaaccaaggatgggacctatcgcatgaaatcatatgtgcaacgcatgttcgattttgtgaagaaacatccattgttaatttttatgtccattatgatgggaacgtcattagcagcaggatacttcatgatgagtaaagactctgaagatgacgatgcaatagtgcaggacaaggttttcaaacgcaatgataaggcaatgctggaatggtgcttgagaggcaaagcatgtaaatgtgacgccacacacttcgaggcacagtatgtacttgattcacgtcattatagaactattctcgaagattgggtaaagttcccattgcgagggttccacaatatacaaatagtaaactatggcacagtgagcaaatatgcacgtgctctagctttcctatcagtttgtgcactcttagctaacccgactatggtgtataatagcgcagcacattccatggctggaaatagtgagtataatgagtcagtagcaaaatccctaatgcacaatattctaagagattggaatagagtcccgctcatagacttattggtaaaagggatagatggaagtgatgatcgttatgatcagtacatacatgaattatatacaagtggaggcctaattgcatttgaatcagacactggaaagtttgaaggaaaaatgtctattagtcaatatcgaaaggatgctgctaaaggacaaacaaaacgtagtgcagcttcacggtcacgtgaagaagatcattatgatccgagatcatcaggtcgactcaagagtgggatcagacgagcatatcgtcaattctataatattgaagattctgatgtgcaggaaattatcctcacaaacaagaaaggagctccaattcttaaaattgggagtcttgatgaattgaaccaacatgttgatcttctaaaattctcagatccagaattgtatgagttgtatttacatgctcgagataaattggatcttgacgaacctgaaagttcaagcggcttcactggaaagtggggtgactatgcggaagatgatgaattcatgaagatgatatcagctttagattcgttaacaaaacaagcttcggaggaagcatttataccagttcaagtgaaacttcgagatgggcgaactgtccaggcaaatgtcgcacgttattggcaaaaagattatccaactggaaaatctgtgaagcaatgggctcaaactacttgggctccaccacaattcacagctcttcgagaaagggtaggaaaagctcttgaactgattcctgaatcgcgaccaattcatcttcatggaaaagtcccaaatggaacacttatagagttccaagatgcaatgaaagatctgcacgagaagacagcagtcaaggctgtagctgaggctaaaatcggagatactcaatttgaggcggatccttctgatgtaacaagccgggttggtgtggttatggtgaaaacatcagcaaacgctgaatgggaatcatggaaccaatgtgttgctttgaataacatagtgatttttccccatcattacacgcttaaagatggtaataatttgagattcaagttttcatcaagtgatttcgaaagcacctgtcacattgtggatgggtacaatgggcttgacatggcttgggctccaattaacgttaaaattcgtggtttgaagaagaaagtttgtttaggcacgccgcggaatggatcttacctatggcatttttccatgattaatcaagggaaagatttgccagaggctcgtcttatgggatactcctctgtaacgaaagtacaagaagagtcgcacccatccttcgattggacacatacagtctcaacgcaagttgggaactgtggtggaccctttgttgataaacatggtgtcattgttggatatcacactggagcttttcaattgggacaatttaatactttcctgggattatcagcaccactaattgcacatctgacaaaattggatgtcaaaccaagtgcccagccccaatcaaagatgatttggagggaagtggatttttatcgatcaccaaattacttacccccaaccattaataaccaagagccaattccagaggagtggagatatccagaaggtaaatctgtttacccatgtgttgatccaggatggatgggttctcgtttggtgaagggatcaggttttcgtctcattggaaaaatgcaacgtcatgtggaatattcaacgaagatttcccttaatgagcattttgacatgtggatgtctcaagagaaaactcaaaatgagttaactaggctgaacaaaaatcgtgtagagaaagggttagagaaagctttcatcagtcacacgatagcagctcagaacaaggaagctgcaattaaagatacgagcaagtatgctagaacaacgttgggaacatattcagaacctttgttgaaaagagcgactgctctgacaatccaaatgctcgaggagcatattaagctatgtaaacgccaaccactggatttagtctatggggatatggaatggaacacagcatgtggagcccagtacaatggattgaaatcagcatttagggatcaagttgttggcatcgagaatatggatgcttatggtcaatactgctgggagcgtttcaacgttccaaccgatcaatacaaaccatgcatttggacaaattcattgaaggatgagttacgaccaattgaaaaagtgaaggagaataaaacgcgcactttcactgcagctccaatcgagtttgtaattggtgctaaacaagctgttgatgcattcaatcatcaattcatggatgcacatttgaagctaccacataccgttggtattaaccaatggtcagggggttggcacaaactatacaagaagttgtatggtaaaaactttgtgtactcaagtggagatggaagccggtttgactcaagtccgtgtttctatatgttcgatgccttgtacacaatacgtacatattttgcagatcctgaaatacaccaggttctggagaatatctacttggaggtttgtcacactccaatagtgttacacgatgggaatgttgtgatgaagaatcatggaaacaatagtggacaatgttctactgttgttgacaatagtctcattatgatgattctatgttgcgcctcttatctagagcacactccagctaccatgcattccctcgatgcaataaaaagccattggcatttttgtgtgaatggagatgattatattggaggaatgtcaccattgttagcaagccatttgactaaagagaagatggcaaaaaccttcagtgacttccagttcatatatgagtggtctgattattcaccatcattatttgaacaagattatatgagtttaaaattcataaacattgttgaacgaaaaggacaaacaactggacaacagttaattgctccatggcgtgaagcatcacgacaactctccactttggctcacacatcaagtggtgcacctgaaatcaaattacaagttgctctaaccgagagggtgaaagcatgggttgataaagatttatttgatttcataacagaatactgcagatggctcgtggagtatttcgatagatttacgaacacgcaagcatggaatgaagctaagaagttatggtgggatgaacaacaaattttcaaccattatttcagttttgaaagcatttgcaatgcgccatactcacaaattgtaaacgaaactcctgatgagttctttgctaatggtgtgagagagtcccgaccattgcgaatcctacgcgatggcatcaaatttggtgttgctgttacagcagctaattatctgggaccaagcgatcacgatgtacccatgattgcaaacacaatgcttaatgttgccaagataggtctcgcaaattcaacagccgagcggattgaccgtatgctatttgggaaggaaaaccctgaacatagtagagcggattcgctagttgttgtaaaaacagagcaaacagatgcgacgatctgtttgcgaactcactgcaaatgccaagcacagcacttcgatgggaaatatgagtgttgggtgagttccccatctgttgctataaaaatgtttgcaacattaaagccccggattctttccacaacgaaatttgttggagttaagtttctaccaaaaatactaagagctcatgtatgggccttatacctatctggattctcttgggaagaaacaatgcaaattgtgcaaagtcactaccctggcgagaaacagcaaagaaaagcggattggttcctacagcaactgctgaaagagctagtattgatattcaaagtgaaagggtcgaagtttattgagttgggagagcatgctcaagttcaagggaaaactcaactcgactctacacaagttgatatggatccaaattttaatgctgcagcttatgctgcaactcttcgaggaggaccgcactggggtacacataattcccaaggtctgtttgatgctattaaggtattaaaccccaatgcagcaaatgttgacattgggaatgcgcgaactgcggttcagcgcgagatgcagcggttgatagctgccgatgctccgcgacaacaaccaccaccacaagttggtggaggacaccaacaaccacctccagctggaggtcaaacgcaaggccagcctggtggttacacaccgagccaggcatttaccaataaatttggtaatataatggctgagcccgatgcccccctcgtgctcgactctcaagcaacaatgagggaagttgcccaaattgaggcagcttgggctcgtcttctagaggtgcaatctctagagggtcttggttccttctggaactacatgttttcctatgtgggaaacaatggcacctcatctggaggtgatcccagggattacatccctgcaggaaatgggcgagttacacttgcccaactaaagtccaaagctcaaggtgagcaatggcgacgttattggcgtagtcatgcgtcagacatgagggatttcttgaggcttcttcaagcttcagatagacctttgcctattcgttgggcaagaaacaatggcattaaagatgccaattacgagattgcattcgattttgcggatgcactcccagatctctcagctgcacaaatgtcaattattttagcagctaagaaccttgccgtaaggcgaggtcaaggccagatgcttaatgctggcaccaaggttggaggtcggtcaagaaccgaaacctatgaccaggctgtccgcgatgctgcggatgtccaattcccaggagcataa

SEQ ID NO: 614 - DNA, 6096 bp, Black grass varicosavirus-like virus
  source 1..6096: mol_type = other DNA
atggatactctggagcacgctgaagccaatgagctagaagacgatgattactttcttcctgacgaaggacctcttcatgatatgcacttggctagtgcaatcaacttggatcagatacaggagttgatgtatccagggactataaagtacaagatagatattccctattatttaagggatgagtacatgctgatagaaagtttgtgcaaaggagacaagatcaaaatggagcttggaatgttggctccatctttgaaactgtccaagcctggaggagaattgtcaaccatggatttacctgcatataaagaaataggaaaccttgtctgtcaggctttgaggaatagggacatcatgattcctatctccatgaatgatgtggcgctgaagctcccaggagtaatagtctacaggtcatggggtatagcatttgcagaattgttgaagattatatgcacaagagcagaagtgatgaggggagggtctcagcctgtatatcaaggcactggaattgaagcaggtgcagcacattgtcagtttcaagtcaacggcaattggtaccagatcgttgcgaggaagaatctctcaacactatatgacaggcaagagaatgtaatgtatataggaaatatacactcattgcttttgctaatggataccatcggacagaggatttgtttaatggttgccaatcagatagcagaactttatgatacacctggatgggttgatcaaggaaaaattgaccaaatattatcaactggagatgacattctggaagaaatgggaaatgatggatatgaaacaattgctatgtttgaatctcttgttataggaaaggtgttgagagcaactcccgatgacatcacagaatgccataagtttttgtacaactgtatggatgaggtagaaaacatgctactaaactctgctatgagaggaagaatcattgaacttgttcacagatggttggccatatttgacagtttatcgatcaaagagttatcaaatgtcttttgcttatatcgatgttggggacacccggttgtaaatatctatgaagggatggagaaagtttacgacatcggcactgaagagaaagaagttagcccatgggtagcaactgacatattgtgtcagttcagaaaaactttcttgataaattattacgagaagcatcactactatccaaacgtcttgatatcagaagaggtagaaaactcatatgttgctcaatgcattaagaagggttcttcaatagaggagatgtatcctacttatgatactaaggacttcttgggaatcgaaatccagaagatatgggacattccaataacatttgacctttgtcacattcttaatgataaagcagtatctccgaaccagaaggagctaacagacagtgttgtcaggtaccaaaacactacaggaggtcagaacagaagagggctccttagatggttgagaggaaagagcttaaactgcagagagttccttcgggagatagatcagaacgggctccctgaggatgagtgtatcattggaatgtacgagaaagagagagaaatcaagatcaaagccagaatgttttctctgatgtcagaaaggatgagatattacttcgttttgacggaagaccttatagctaagcacgtgctggagctatttcccgcaataacaatgaaagattcacaaaatgtactccaaaagaaattttggaccgttggcggaatgggaaaagactccacattcgacgttaatatcaacatcgatttttcgaagtggaattcgaacatgaggaatgaattaactcaacccatgttccaacagttggataagatcttcggatataccaatttgatatcaaggacccacgagatatttgaatcatcgtttgtatattcatcttcaggcaagtatgttcccactgtaaagtttggaaaactccaagaggatcctcctatggcatatcgtggacataagggaggctttgaagggttgagacaaaaaggatggactgtagctacagtatgtgccttatctgcaattgctgagagaagaaatgtgagaacaaaactgatgggacaaggagacaaccagatagttagaatactgatgcccacccagagatggaaatcaaatgagcttactatcaaagaaatgatccaaaatgccaaacagatccaaaaagcctttgtaaccgatatggagagaacatttgaagaggctaaattgcctatcaaggtgagagagacttgggcttctacgagactatttatgtatggaaagatgatcctacatgacggagatgcgatgccccaatggttcaaaaaagtgctgaggtcatacgctctaaccaatgagggtcaagtcactgtagcaggggtggtaggaactattgctactaacatggcttcagcggcaggattgagtgaaatgcctgatgtcatgtatctcatatttgtagcaatgactgagtggtcgctcggttacttgttagagtaccacccattcacacggaaatgcatcctaagagaacatgagtaccatgtaaagatccccggagcacatagaggaagagattatagggtgaggtcagttaacaagagaagattggtagtttctatgatcctgataccaacggcagctggaggaagtgtaacagttcctctccctggattcattatgaggggattccctgatcacgcctcagaggcttatgcctggatcaagatgcttgcggaagtaaagagtccatacaaaacaatgttaaagaactggtacactttcatcgggaatgattctatccaacctgatatgttgatccagagcccgtcatcaatcaacttcttgaagccgccaacacccagctttcaagggagaatgaacgtaagagagctcttattgtctggagaatttgatcagaaccagttcatcaaagaagcaggaacaatattgggagtctttgacaggaagaaggtctgctctgcgatgttaacagacccaatgaaccctttcataacctcagaggtttattccacttatgcccatgtgtacatagacggagtgataaaaagagtagaaaacaccagtactatcaagaagttggcccaaaaggtgaaaaccaagactcaagtcattaaggcaatgatgtacaatgaacataacttcatcatgttcataagttggagagcaatgaaaagaggtaccatcgactatgattgtgcaacccagcaagctagaatggctaggaatattggttggggaagaacaattactggtgtgaccacacctcatccagtagaattggggattggtcatatatgtaaaggtagacaagatgaatgtcctccaacggattacatttatgtcagaataaatgaaaagggagaatttgtcccttatcttgggtcaagaatcaagtgtaaagtcgtatcagagcaagatatagatgccagaagagagccactgattgctgtgggttcgcgtatatgcaggtactcgtcgtggcttggaattggcccaaatctgatggaaattgttgagaaaaacctagctgttgtctgtgacacatctgtctatgacaaatttatagacgatgatccaaagggactgttgtcatcaggatctattgatcatagattcactccagcaggagcatctgagggagttttcatcaactatgcaccacagattggttgtaatgtgtacatgtcgagcgattgtatgccgacctatggaagaggccagaccaactacactttgcacttccaggctctatattgttggctgcaatacatctcatcaaggagggctgaaagtgtattcatgcatcatcacatagagtgtgaagattgtgtcgtaccaactactgatgaagtccccgacatccagtgcccctttccctatttcgataatatatatcccccaagagtaagggacagcatatcaagagccttgggattcattgataggaaaggaggactagatattatgagcaatgtaagatcattgtgtcatgaagctgaaccaggcatgtttgatgttagacaattgcaaaagggagtgatgtggacactagcaataaagatcggatttcgattgtaccatgggggattattcgggtcagatgataccagagttgaggaccttcaggagtatcccaggatttactcatataaattatacagagataccttactggtcaatgtggcacatgtgatgatgatgcttgcagccatagagatggataaggcacctgatggtgaggaactcgcaaaagtcagaagaagagcaactgataaactgttgtcgaaacccattggaagcttcaaggggttaggaggattaactctaggaaggactgatgagaatccagataacagtcatttgtttatgactggctcattcccagaaactgtattctcaatattgaatacttccaagactgcattaatagagacaattggtcagattggacgcttatccatcgaaggaatgggccatcttcctgtggccaaaggttctctgtccaataagcagtttcgatttctgataatgatgagatgtttgttagaatgcaggaactctcattactttcaacactttcagaagatcccagaggacgaaccaggacatccagcggaccctcaaaatgacgtttatagaatgcttgtcaaaactcccgttctagatatgagtctagacaagatggtcaaatcacttgctgttattaacgaaagaaagactcttccgataatcgaatggaataacatctccttcgaatcaacagaagtgatctgcaggacaggaactcccaggtccatattcatcggaaatagaatgatcgttgagcaaaatagtagaagagagtacagagaagtaactcttccaacatctagcatttacaagtgggctgggatcttgtttcacaaacccttgaaaagacatatcattgtgttgggagatggaacaggaggaacctcactgttggtgaaaacattcaatcaagactctacagtgtacccttgctcctatttagaaacccataagattattccccaagatatggaatgtttaatgcctcaattgtctagaggatatgagggaatctccgggcgagttttgttaaatgttccagatgatatcaaggatcctctctggtcagaaagaatgtctagtgagataaatgacatgggcgttgaaaggacctctatagtctgcgatatagagaccgttgggctatgtgttctccttgatgcattcaggagtttacctcaaggagttcaagtagttatgaaaacctatgccaaagatatattgactaatatcatgtcaataatgggcttgaatcaggtagaggtgggattttctccgcatctgaaccagagcaaccatgaagtgtttctaatgggacacatctcacagaattcttttccagatcctgacatgatgatcaatcaaatggtaaagctttatggtaaggtgagagctgatccaagatccagaatcctggaggaaatgaggatgataaacaaagtattcaagccattaaagaatacgtctgtgtctctatctctagctcatataaataatctgggaattactatgaccagggagatattacaactggatggacttgagatctggggatatgcactgcaatttgtaaatcgtcattatgttgacccatctcatagagcatttcttgctgacaagaaaacgatgaacaggaaaagaaagagagatttgacaagggcattcaggatattgctaggagtggttgtgaatccaggatacctggatataaaacgcaaatggggtattagaactcccaaggaattcaaaccaagaggaatgaaccttatactagccagagattgtgatgatatgggtgtcaaattaaccaagaaggacaaattggcctctgaatgccttcattgcttttggaccaggaagatgaggaaagctcctctagatgcaccagatccaccgggggaagattggatggaaagtgcaacaagagttcgatcatttgccagcagtttatctgagcactcttctcatgattacatcaatgtcattgagacagagtag

SEQ ID NO: 615 - DNA, 7017 bp, Maize suscal virus
  source 1..7017: mol_type = other DNA
atggagacctttctagatgaacaatttgatgatatgctatctgaatttgagcaagcacggctgtctcggtttccagcctcacatcacagctcggctttaacatattatcctcaacgccatattctgtcattaatgtctccaaactgtcctgtgaaaccaactccccttctgcgggcatactgtgatgcggtcaataaagtatctgatctcttggggggtgggtgtgatgccacagacaacccagctccagtatactcttatatcttctctcagacaacggcttcttcgccagcctattatgacccagactatgaggatccatacctgctggattccctgcgagcagcctcagatgctgtgcttgaagatattgaagctatagaatctcatcatccgggtttttcgctggataaccagaagttgcgactgctgcggaaagtctcttcacgtctccatgcttcctgcaaacagatatttgcggtgcgaagaatgttagaaaaagttagaaatcaaatccagaaatgtcacatcggggttgatcacaagcttatgccagcagtgagattaggaaatttgagtatacacactgttagagatctcatcttcgtagccggactgcaaccattccccatgcgcatccatatactaaattacgatcagtggctaatgatctacgacacagtctgttgccgtgcaatggtaaaggtggcaactttatggaacgaggaattacgcactgacaatatcccttcatgggagatcgtgtcctcagtttataaatggggcgacgcacttttaaccaactatggtgtctcagcgtatgctattataggagaatttgaatcaatagtgactggtgtcttaattacgttttctgacactgacacactaggacttggtgcctcatttgtcaactcaataatggagaacgcgcaagagcaaagcagagcttataatatacctgcgaatgagacattgaagctgatatcattgcttagaactgttgagtctgtgaactggctgtcagagttgttcggtttgagaaagcattggggaaatccaatggtggacgcgcgagcatcgggaaaagcagttcaggagaaggtagatgaggtattgccagttaaagggactgcacttgtgaaattattggcatctttcaacaggatggttacactgtcattcatctctcagcatgggcaatggccggacggttactacctctcgaactcaagagactgcccgctgaaaagagccttcgaatcacggtctacccgtatcccagagactgtggaagggcatcgtcatgaagactgggcatgctttgtgtttctacccaactgcattttagactcatatgaagatgacctggcattaatatcagataaagctgtcagtgtgtaccgcgaacacttagattcagtctatgtgcgggctctctgtaataagcagagtcagggcacggttgaggaagacagaaggttgatgttagagtacttgaggaaacagcatatgccaatactggatattttcaaaatagtaatgacagacgcagtgccgccccgatggatggccaactgtgctagcatgaaaggaacagaaatgaagcacttgaaggcccgaatttttgcggtgcttacatatgagatgagacagtactttgctgcgtcagaagacatactgaagaacaacttatttaagtataacccgcatcagactatgactatgtcagaaacagagctattgactcgactaaaatcattaactactcaattggatccaaacagtcaaagccggcagctgagtgtaatccatattgttgatttttcgaaatggaatttgagaatgagatacactaatacatgcttggtattcaaatctatagacgatttcttaggaactccaggcttgtttgagaattctcatccactcttcagtgatatgctcaacatggtttcagacccattcaatcctccagcgttaggagtagaagagacagaatctgacactatttggagaaatcatcacgcggggtgggagggtcagcgtcagaagggatggacaatcttaacatctgcactcttgtctgacctggagagaacaaccggagttcatagtgaaatatgcggccaaggtgataaccaggcactactaagcaaatttcctgtccccactatctataggaatccggaagaatggatcaagagtgatcctacggaggttaggaaggtgcttgacgacttctatttgagattagaaaaggaatgtgaagctgtaggtctgaagataaaaacagctgagacctgtcgaagtctttgttttttcaactacgggaaaagactctatttcaaaggcagtgaactatccatgaccctaaaacggttctcaaaaaacataacccagcctaatgactcatacccaacaacagaggctattcttaagacatatgagggttcatcttatgcagctggcctttatagccatccaagtctgctgccatactggatgagtaaattctctgtagcccatcaattattcaacagcttcactaacaaccagctttgtgcagaagccccagtacagatgatgtccacctttgggttcccgatcaactaccgactgatcagcacgttgatgaagatcccagcatctctaggtggcccacctcagcagtgtctggctgattatctgctacgcggccatccagatccactatgcactgatttagtcgggttgacattgaagtcaaaggccgggtgtgtgatctctaagaagataattcgtctagctcaatctggtaaatggtttagccaacgcactctgaccagagattccctaatcaaatctccttattctctgaacctcagggtcccattatcagttcgacaaccaattgaagaggctgtgctcccggctgtgcgagctcactgcaacaataacttagtgaaatctctatttgatagctcgatggatgacgacgagagatatattcttgactctttaggtcttatgaagccgttccatccgctcgtggccaacgatatttattcaaggactttaccaggaagaagacagatgtttatatcaggactggcgaataccacgagcttaggtcgcctgattaaagggaattctgcgtttcctctgatctacaaagtcatggatttggagatggagcagctaaaaagctggatagtccagctaacagagcttctcggtttacctgataatgatgatattattcttcctcatcatatattagcgcaacagctgcgcgagaaatcgtggaatacagtcattgagggcataacagttccacatccgttagaacagttcatgcttactctatcaaaatcggacgtctgcaccaacgactgttatacagtagaacctgagcatattgtattggttcaacactccgaggatgtggttgtgtctcccggtgtggaccgtgaccacatcacagcagcgcggtcaaagaaagggagcccctatcttggcagccatatcggagaaggcattgtacagaagcagcttatttgtctaaatccagatacttcctggagagatgtcattagactaaacactatcaagcgttgggtggctccagaggggtctaggctgaggttgtttatgaatggaattataagctcgcggactaacatatctcgtgcctacatagatctcgccacaggcgttccgagtagattgtcttacaaccaccgggccagcctgatggggtcaataaacagctgctctatcagttcgaccacaaacatgcacacaaggttgtacttatcctcgaacagaatgggagattattctcatggtttgaaaaattatcacatgcctttcgggcccacctttctctgttatcagacgctcgtctgcttgatcgggatcttttcacctgagaaatgggcattccctagaaatgtttatcatattcatgtcagagactctagggtgccgccggtgtacgatggcgggttagagctagaagacctaactgtccttgatctgaaaggacacccgcctaccatccttaggtgcttagcctccaaactggtattcgaagcagcaccaggatatgcatcgttcggattttggtgtgagttcgaaacagcatcgaggactgatgcgaaatatgggtatgcccaacagctgacgggtggtttgttcattcaggagacggttgtaagagaatctataacacacgacaggattgggagctttgcatcgagaccggctgtcatatcaattggagacatctcattgatcgagccatctctattccttcgttccatcgcctggggtatgctgttgctcgcacctatgcatctgctgcatttcagaggcaaatatgcattcaaagtttcctgcgtggaatatgtcaatcttttcagccgagctttttggtcttcatttgaatccccaatgagcaacccccgaataattaggaagctcggaaagcatgtcgcgttgatgtctagtcatagtctaggtaggctagattccggcatcatcccagctctgcagataataatcgttgaagagatgtggtgtatcatacattcgatcgccacctatttccgtcgaggaggtgataaaccgaatatcccccccatctttgccccatcgggttctgctgccctactcctcacctcacgagtgatagaaatgatggtcactatacggctagtagttgggaactgcagcatcagtaagatagtagggttcccaagagatttctcggcaaatcttatgagtgtgccgcagccaatatctgccgcagctctgatcgtgatacaacatgacttcttagaattgcagcgtcacttgaaactgccattacgggacatggtgatacccagagtgttctcaacccattacccctgggttgatatcttaaggaagactgacagtgtggaggcagacgatgaagacccgcagaggcaattagtcctcccagtcgactttccgcagtgtgctaatgtagtagaatttcgtatccctgagaaccctgtgttggagactactccacaatgtgactgtaaaacgacacaaagaaagagagatttacatgatgaatgtttcttttcgctgagtgggaactatagcaaatcccacctcaaaattctggagttgatcttttcgttccacctgcctatagcaaatctctgcgtgcttggctctggcactggttctgaagcatgtgcgttaagtaattatctggactgcagacaggtttatgtgaattgctaccacaaactaactgacttctccccgcatgctgcttccacttatgttccgcctgcattcaggtctgatggtatagtgactaagctcgtctctccagcctctgctgtcctaagtctgtcagatctcacggacatcaggactgcggatgctatatatcagcacttaagaggtattgctacaactggtatcatttgcgatgcagagattccaagtgcagcaactcctttactctactcacagataatgcatacaatagtggcagttgtgaggaagaaagcctctatcaactgggtgttaatcaaagtgccgatcttctgtgttcataagcttcttggcctggcagctccactagctcaggccttccatagaatcatctttgcttatccagacttcgggaagcctcattcaagtttggtctatattgtcgctactattcgggctaaggcaactccaattgaagagaataggctgcctactgtaatgcttgaagacgagatgctcagagagatgttggcctctatcagcagtcagaaccattgtagattatatgagatgagggtagcggatagaataagtcggttaagccttaatctaacccttcctcaaagcttgactgtggcttcgaatcggtttgtgcaaggcctgatcctcactgaagacgaaatctccgacccggaacaagttataaaggtactgaaggctgtgaggcaagggttgttgacctcagcacagaaagtagttgaaactcatttccgagttcataatgaaatcacaatgccgaggtcagctgtcctctctgcggatttaggaacccttcacggacagttaaacaacacatacctgaaagtcgctaaatgtgatctgctgttagagctgttgcaccttattcatcctaccctcgaacagatcaagaatcgtgtgtacagctggttggctacagcccactcgtatagaatgagaaacaggaacttcaatgtctacatcaaccagaccagatttatatcacatgattctagatatttattcgaaatccttggacatcttatgaaaagatctgttcccacagttggactccccatccatatggattaccatttattcggatctaggacactgaggcctaagcaacttattgttccttgcccaataggcgtatgtcgaagtccatcaggtagaactagcaaatggaagtggcagaaacgaagtgagatacttggttgggcaatctcattaaccctcacaaatttaccgatagcagttgaggatcataatagcttttcgctggatttcctacacgaaaaaggcatcttagaagatgttcgcatgatggcctcattaaacccatcccgcatagaggtcccttacttctttaggcccaatgagatggccctcgatttgttggcgcatgaccggttgttccttgttgcgccgttgaattctttctcactactcagaagccgttacacaaccgttgagccatactttgttccttggtcgggggcccctttagcttggtgtctattttatctggaggagcggaaccaaattgatagcctgattgtggatgagatctgccttgatgatactctgtcggtcaacacttatgtcgacacagacagcatgtcctgtagatgcctgagctgcaaaacggaagaagtcttgggagagaggttttcgttaaataccaacgatctggatttcctgtgttctcttggatctatagagacagtctatgattctgagcatgctttgtag

SEQ ID NO: 616 - DNA, 7954 bp, Horseradish latent virus
  source 1..7954: mol_type = genomic DNA
tggtatcagagccatgagtattgaaaaatacataagatcttcggatcaatataacccaataacaaggttatacgaggtatatacgcatataccccggatcggcagcgtagagatacgttttgctaagtcatctacatacggtgtagaggacacatccgctaggatgagcatgtatactgccatcagatccgtttgatggtgcgcgtactaagtataactaagttatataattgttgaaaaacaaaatggatttatatccaaccaaagaggaagatacccctcaaaatcaaactgagaaatacgttttctcaaaagaagattcatctggatattcggctgaattaatggtcaataatgacttattaaaaactatttctaaaactaaattaactttagaaaaagaaaaagtttttagaatgacaaatcctttaacctcaatggttaaaagcctgtgtcagagaaagaaccacatattctattgcgtaactacgaaagagttatcaatagatatttgtgaatcttcaggtaaagtctacttacctcttctaacaaatgaagagataaatgggcgattaaccaaagtcgatccaaggatcagacaaacactctctattgttcatataggtgcagtgaagatattgctcaaagcgcaattcagaaacgggatcaactctcccgtcaaactcgctctcattgatgaccgaatcaatgaccgaaaagactgcctcctcggagcagcaagaggtaacttaaactacggtaaatttatgtttaccgtttatccaaaatttggtgtaagtttaagaactaaaaggttaaatcaaaccttaagctttattcatgaatttgagagaaataatttaatgaataaaggagataaagttatgaccataacctacttagtagcttatgcactaacaaatagtcatcacagcatagactataaatctagttctaatattgaattagaagatgttttccaagaaattggaaacgttgaacaatccgaattttgcattattgaaaatgaagattgtaattgggcaattgatattgcacaaaacaaagctgaattgggtaaaactaaaaagcttatatctgataatcaattaaaaattgaatcaggagaatctagtaatggtgaattacatagattaaatgaaagcgttaataaattacgcgaaaaatttgtagaaatttgtgggtagaatgagtgatctcaccaaacttccacacatctacaagaaaggtgaaacgatagttcgtttaaagccactggcaataaacaagaacgatcgggtatatgtgtttagctccgctaaatccaatatacaatcaatcaccaactccttgaataatctcaatgagattgttgggagaatactccttgggacttggaaaatcaattcattttttggattatccaaagatccctcagagtcaacctcaaaaaacccatctgtttttgataatgctaaaaccatttttaagagtgggggggttgataatacagcgttactaaaagaaatcaaaacccttttagaatcgcaaaacactaggattaaaaacctagaaaaccaatcgaaatccttgacggataagattgaacctgaacctttaaccaaggatgaggtaaaagacttaaaagagtcaattaggtttatccgagataagttgaaagacataatcggataaaactggcgaatctaaatcagattcaaaaggaagtatcccaagccttagaagagattaggtctctaaaaaaggatacagaagccattctagcaaaattaggatcaaccgaacctaacaacctagaagccattgccgcaaagataatcaatgacgttacgaaagtaatacgagattgtccttgtaacaaggaaattctggaagcttttgctaagcaaccagagaagaaaggtgaaataatcccttccaataaacctggatcttcttcatccaagttaaagaagtattcgtaccccaatactggagtaggaaactcaaacctaggtagttctgaaaaccctaaagcccttacctggccttttggatcatagaatgcctagaaccgtgggtcaaaccatagatgacttctggtcaaatctaggtgtaaaccagctagatgaacatgagttcgatcttatgatcaacctcatgaccgacgatgatgtatcctcggatacatcctttgatagtttaacctctctcttttctgagttattacaggttgaacaggaaatcacttcggaagaagaaagatgccaacttcttgaaaaagaagacagttctgacgaatccatacccaacgattctgatgaagaaagcgttcctgaacaagtcaggatggaaaaaggcaaaggaccggccaaaccatacgactacttcgacaacgaaagcagcgatatggaatatggagattacaatccatacggcagaagcgggcaaacaaacaaacccgcaagaacacgaccaaaattggccagtgaaacacttggacgaaatccaaggattctcaatctcgactgcaccaacagtctgagagacagaaaaagattagtagaagaatggggagccgaaatcagcctcaccatccaaactaatctagacgaatattccgaccctgacatggtgttactattaatggagcatctgacggccggaagtgtcaaatcgttcatcaagacaacgaaatggagtgaactatccggaggaatctatgaccttgtcatggaaggaattcacgtcatgtttcttggcgaacaaccaaatgaagctttcgacaaagctaaagaacaagcagcagcaaaggacaaactccttaagatgcagctctgtgatatatgttctctcgacacattcacctgtgccttcgagaaagcattatacaaactcgattccggagactttcctccaattatcgagcaatatctggcgaaaataccggaggtaggcgccaaagcccagcagcgatacaaagaagaagctactggagcaatgaaatacagtcttggatttgccaacaagattgttaaggaagaattgaagaaggtgtgcgagctcaccagacttcaaaagaaactgaagaaattcagaaaaacctgttgcaaacaggttgaagaaagattggaatatgggtgcaggcccatatacaaaaagaaatccaagcggaggaagcccaaagtccgcaaatacaaaaagtacaaaccctttaaacgacgaaagaagtttaaaacaggaaagtactttcggcccaaaaccgaaaagaaagtttgcccaaaaggcaaaggaaagaattgcaaatgttggatttgcaatgtcgaaggccattacgccaacgaatgtcctaatcgacaaacttctcagaaggctcacatccttcaagaagccattcaacttggtctccagccagtagaagacgtctacgaaggagaacaagaagtattcgttatcgaatacatagaagtttcagaagatgaaacctcaacctctgaagacgatggaacatctacttcagaagactcagattcagactgagcaggtgatgaacatcaccaacccaaactcgatttacatccgaggaaggctatacttctcaggatacaagatcgtggagctcgactgtttcgtagatacaggagcaagtctgtgtattgcaagcaaacacgtaataccagaagaaagatgggaagcagctcccagaaagatcaacgtgaagatcgccaatgaaagcacgatcacgctcgataagatatgtcgtaacctcgacatcatcattgccggagaacgattccacattgacgtcgtcttccagcaagaaagcggtatcgacttcatcatcggtaataacttctgtcaggagtactctcctttcatacagttcacaggacacattgtgttcacgatgaaagatcaataccaagtaccaatcacgaagctccgacgagctttcaagagaggaattcctggatttttagaatccatgaagaagagatcaacggctcaacaacctgaaccgctcaacatctctacaaataaaaccgtttcactttcaagggggaggaggtttggagaaaaactcagaatcacccaagaaaggatggtaaaaatcgaagaactacttgaaaaagtttgttctgagaacccattggacccagagaagtccaaaggatggatgcaagccagcatcaaactatcggatcccacgaaggttatcaaggttaaacccatgaaatatagcccaatggaccgagaagaatttgagaagcaaattcaagaattactggacctcaaggtaatcaggcccagtaaaagcccacatatggcaccagcgttcttagtcaacaacgaagctgagaaacgcagaggaaagaagcgtatggtggtcaactacaaagcaatgaatgatgcgactgtaggcgacgcatacaatcttcccaacaaggatgaactccttacgctcatcagaggaaagaaaatcttctcttcctttgactgcaaatcaggattctggcaagttaggcttgacgaagaatcaaaatccttaacggcgtttacatgcccacaaggacactatgagtggaacgtggtccccttcggcatgaagcaggcaccatcgatattccaaagacacatggatgaagcattcaaagtgtttaggaagttctgctgcatatacgttgacgacatcctcgtcttcagcgacaacgagcagaatcatcaacttcatgttgcgatgattctccagaaatgctatcaacatggcatcatactttccaagaagaaagcacagctcttcaaagaaagaatcaacttccttggcctggagatagatcaaggaacgcatagacctcaatcgcatatcttggaacacatccaaaagttcccagatatcattgaaagcaagctacagcttcaacgattcctcggagtactaacatacgcctccgactacatcccgaagctagctcaaatccgaaagcctctgcaagccaagctcaaggaaaacgttcaatggagatggactcctgaggacacattatacatgaagaaggttaaaaagaatctcaacggattccctcctcttcatcatccccttccagaagagaagctgattatcgagaccgatgcatcagacaactactggggaggtattctcaaagctattcatatagatttatctactaacgaatctattgaattagtttgcagatatgcatcaggcagcttcaaacctgctgagcaaaattaccatagcaacgataaagaaacgcttgcggtaataagaactattcaaaagttcagtatttatctgacaccggtaagatttctggtaagaacagataatacgcactttaagtatttccttaatattaattataaaggagattctaaaatgggtagaaatatccgatggcaaggttggttgcaaaactatgtctttgatgttgaccacattaaaggcactaacaattgcctcgcagattttttatcaagggaattcaatggagcttagcgcgtcttttgaaatccgtcaacagaaacgcgacacgcgtaaaagatgacaccatacacttgtggtgagaatcaataggccactgcctatataaacactctatcaccgatctgaaaaactcagatcctcaaaatggaggaaatagataaactcttacttcaagagaaaatcttattactagagctcgatctagtaagggcaaagataagcctagctagagccacaggctcgatgcaacaaaaggaagaaattccttgccgtgaaacaccggtaaatactctcacgagtaaattggttattatggagccagggcaatcgtccaaatctataactattccagagcaaacggctcatggtaaagaatcaacaaatccgttgatggctagtcttttgccaaaagagacaaaggtggtacagaccactagactggttaaaccagaggactttttacgtccaaacatgggtattccaatcccagaaaaagctgagcctagcagttcagttggtcctaacaggccagaaaaggagattcaaactcctcataacaactactatgttgtatataacggtccatatgccggtatatatgacaattggggttgtgccaagtctgcgacaaacggagttcccggagttgcacacaaaaagtttgccactattactgaggcaagaaagtctgcagacgagttcaccactgctgcaggaaaagataggcttaacttcgtccccaaaggcgaattagtcaagccaaagacttttgcaaaggccgtaacaagccctaaaaagtcaactcaatggatcactctcggaactaaaaagcctaagaaggatccagaaccaaaggagatcgcctttcaaccggagatcactattgaagacttccagtatctctatgatcttggaagaaaatacgatggcgaaggagacaccaccttcttcaccaccgacaagaagaacatatccatgttcaacttcctgaagaatgcagatccacagatgatctcggaatgctttcaagcaggactaatcaagacgatctaccccagtgcaaatctgcaggagatcaaatatcttcccaagaagataaaagatgcagtcaaaaaatacagaacaaactgcatcaagaacactgagaaagacatctttctcaagatcaagagcaccatcccagtctggagtgctacagggcttttacacaagcctaaatacatgatcgagatcggtgtctcgggaaaagttcgacctgaagaatctaagtccatggagtcaacgattcagaaggaagaattaatggaccttgcggtcttaaaggcgcaaacattcattgacagcctaatgaagatcaatcaacgcgaaaagatcttcgtcaacatggtagactatgaaacactagtctactcaaagaacttgaagaagacgactcaggaagacaggagcgtcatcaacaagtttcagcaaaagctgattagtggaaaaatccttggattccactctccagcaatctgccagcacataaaggtgacagcagaaaaagaagattgtgactaccactgcaatcagtgcgaatcttcaaaaggaaaggctatcgtttgcgataagcctgccgacagtggtccagccgacaatggagggccccagacacgtgaagacgcgtctgccgacagtgggtctcggacaacagacaccacgcactcagcaagtggatgaaataattcatctgctgacgtaagggatgacgatcaatcccactatcccaagacccttcacttctatataagtgaagttgcttcatttggagaaggcatctcgaaatctcaacacaactcgagctctcccttctctcttctttatctctctaaatgtgtgagtagaatcccgataagggaataggtagctacagagatcccggcctacgggccaattaaggggatctcctaaaatgtttgtattttcctttgtattatccagaaataaataaagaaaacctttacaaaaacccgagtgttctcccgcctttctctaaatctcatgtatctcaatagatactccgtctgaatagcaatcctccacgggacgctgtgagcctggagacctgatgccgtttgaagctgaagaagtaccgccgaggcagggggccgtttagggaaaaagtaagcgaggctggtttggcagcagtgactcaacctagggagtattcagatagacggaggtagatgaaagacaacgagaaaacaggaagttccgacggacactgttcaggtcagatttatttaaatctgttaatactctcattaaggagattaaccctaattagtggatctaaggggctacttataaacccttatcaatttaaaatcttgttaatcaagaaactaaacaagtggtttaaatgccacaaatcaaccttccgcagcacgaatctggtcgtgcaaaaat

SEQ ID NO: 617 - DNA, 2613 bp, Bean latent virus
  source 1..2613: mol_type = genomic DNA
accggatggccgcgcgattttttttatcccttgatcctacggtcgcccgcaattcgcgcttggtccatgtgaatgtgataaaaagtgaccaatcatgtttcgtttgacgagtctaattattgtttcttcgtccccacgtgatggaccaagtgctttatatatttgaattaaatgcttatcctctttaattcaaaatgcctaagcgcgatgccccgtggcgcacaatggcggggacctccaaggtcagccgctccgcgaattattcgcctcgtggaggtatgggtccaaagatggacaaggcctctgcttgggttaacaggcccatgtataggaagcccaggatatatcgggtccaaagaggacctgacgtccctagaggctgtgaagggccttgtaaggtccagtcatttgaacagcgtcatgatatttctcatgttggtaaggtcatttgtatatctgatgtcacacgtggtaacggtattactcatcgtgtgggaaaacgtttttgtgttaagtctgtgtatattttaggtaagatatggatggacgagaatattaaattgaagaaccacacgaacagcgtcatgttctggttggtcagagacagaagaccatatggcacgcctatggattttggtcaagtctttaacatgtatgacaatgagcccagtactgccactgtcaagaacgatcttcgtgatcgttttcaagttttacacaggttctatgcgaaggtgactggtggtcagtatgctagcaacgagcaggctattgttaggcgattttggaaggtgaataatcatgtcgtgtacaatcatcaagaagcagccaagtacgagaatcacacggagaatgcgttactattgtatatggcatgtacgcatgcctccaatcctgtatatgctacgttgaaaatacgtagttatttctatgactcgatttccaattaataaatgttaaattttattgaatgatcttctattacatgagttacatatggtctgtctgttgcgaaagcaacagctcgaattacattattaattgaaataacgcccaaattgtctaagtacaacatgactaaatgcctaaatctatttaagtaagtcgttccagaaactcgaatcaatgtcgtccagacttggaaatttagatacgctttgtgtagatccagagccctcctcaggttgtggttgaaccttatctggatgtggaatatcctcgtcaaggagaacggtggatcctctactcttgttatcttgaaataaaggggatttggcacctcccagataaaaacgccactctctgcttgatgcgcagtgatgggttcccctgtgagtgaatccatgattgaagcagttgatgtgtaggaagatcgaacagccgcactccaagtcgattcttctacgtcggactgccctgcgttttgcaaaccggtgctgaggtttgatagaggggggagttgaggaagatgaatttcgcattatgaagcgtccacgcttttagatgtgcattctcttgtctatccaagtagtctttataactcgccccctctcctggattgcaaagcacaattgatgggataccacctttaatttgaactggctttccgtacttgcaatttgtttgccaattcttttgggccccgataagctctttccagtgcttcatctttaagtattgtggagcgacgtcatcaatgacgttgtaatctacattatttgaatagacaaaagaattgaaatccaggtgtccactcaagtaattatgagaacctaatgaacgtgcccacattgtttttccagttcttgaatcaccttcaatgatgatactaataggtctctctgtccgcgcagcggcaccccttccgaaataatcgtcagcccattgttgcatatccagtggaacgttgttgaacgacgattgtggaaatggaggaacccatggttccgggggtttttggaatatccttgttgcgtttgagaccagattatgatattgaaggaagaaatgttgaggttgttcttccttgattatctgcagagccgcttctgcagaacctgcatttaatgccttcgcgtatgtgtcgttagcagattgctgacctcctctagcagatctgccgtcgatttggaactctccccattcaattgtatctccatccttgtcgatgtaggacttgacatcggagctggatttagctccctgtatgttcggatggaaatgtgctgacctggttgtggagaccaggtcgaagaatctgttatttgaacattggtatttcccttcgaactggataagcacgtgtagatgaggttgcccatcttcatgtgtttctctgcatatcttgataaacttcttgttaactggagttgttagacgttgtaattgtgataatgcctcttctttggatatggaacactgaggatatgtgaggaagtagttcttggcatttaagcgaaagcgtttcgggagtggcatatttgtaataagaggggtgtacaccgattgaggctctctcaaaactgtcataatgaatcggtgtatggtgtacaatttatactagaaccctcaatctcaatttctgcacacgtggcggccatccgatataatatt

SEQ ID NO: 618 - DNA, 2756 bp, Rice latent virus 1
  source 1..2756: mol_type = genomic DNA
atggcgaatttctctatcctcactgactcggcctaccctacggttccttcgcctccaagtcaagcggtgtcggccgggtttgaaggtgctctgacgacgcttttcctcgtcgttatcggctctctattgttcgttggcgtgttctatctcggctgggttctctgcgtgaaggacctcgtcctcaccttcaaggcccgccgccaaaggaggaccgaggagatcggtttcgggaacactcccgcgagggttgatgccaggggggtctaagagggcctcgtccgggaaagatggttcgaggccgaagcgtcgcaagggagagcccgaggccgcctttagggcccgcatattgggctgggcctcttcccagttcgggaggagggtctacggtggcgttggttcgtcgcagagtgctccgctgcaggtgcggacgtacaagtgggagaatccggacaagagtgccattgctatcgataccggctccatatggatcgtcaatacgttggacgctggtaacggggatgaccagagacatactcacaagactattatctacaagatgctgtttcagggtacgatgtggattaatgatgccacgtcggcagtctgcgggccactgacagttcatttctggctggtgtatgatgctgcgccgaagggggttcttcctgcccttactgacatattcgaggagggattctctggcctgggttcaacctgggtcgttaaccgggacaacgttcaccggttcgtggtgaagaggaggtggcagatgcgactgatgaccaatgggcagaagccgtactacactaaccgcagtgggaacggagatcccaccagtgtcacgatacgggacttcaggaagttcttcacgaagctgcgtactgcaacggagtggaagaactccgcaacaggagggataggggatataaagaaaggggccctatatctttgtgccatgtgttcgcaggcacctgaggggtccgctagagctattaacctgggggtgaagtttaggggccagagccgcatatacttcaaatgtaccggaaatcaatgataataaaacataatattttattcagattccatagatccgttattacaaggcagtacagtttgtacgacgaagcacagtatagcgacggatggagcactgtgcgtagcgtccggaggaggttggtagggcggtattagggaagaagggcaacatacaataccatacacacattattacacactaagcacccgaagggtgcttgaagaaactatccccttcatacatgtaatgtatcacgcagttgctttcgatgtacttggtctgagccggtgtacattgactcagccagtcttcgtcttcatttaccaggacgatggaggggatcccaccacttattaccttccgcttgccgtacttaggattgacggtgtagtcacggtgacatccgattagctgcttccaattagggcagtacttgaacgggatgtcgtctataacattgtattgtgcggtggggtcataagtggtgaagtccaccagtccgttccaatagttgtgcttcccgaggcttcttgcccaggttgtctttcctgttcgggttggtccgcatacatatagggaggtatatcttctggcggttgttggagcatcctggatgtcaaatcatggacgtgctgtagatattcggcagtagttacatcaagataatccatgttttgacgtgtttgtgtgtatacttcttcacataccgtgtatgtctttatgttctctgtggcccactgactcagctgttcgctgcaacgtagctgatcagtggggacagagcttgcgtatggagttacggtggtggggaagagcttctctgcgctgtactcgaactgggccagcctagttgcccagtcgaaggggaatgtctggcgtaccatagagaggtactctgttttcgaggtggacgaggagatgattttcctcatcttggtgtccttggtgtcagatccaggggccctcctcttgagggtcttcttgctgaacggtttggcgttgtagaattcgccccattctgcaatactgacggttcccggcttggtgatgtagtctctgacctgcttgcagttctgagcaggctgacagttaggatgataagactgatagtcaaaaaacctagagtctttggtctccaggcggttagatagctgtaaaagggtgtgtaggtgaaaggatccatctttgtgactctcacgagtaacaagtatgtagataggtacacgactgtggagcagagtaagaagatagtgaaggagttcccaaggatcaacaggacacttaggataggtgaggaagaagtacttggtccgtacgctgaattggtgggaagtggagggatcggccatgagtgaagcggagccgttggatttggctgaaagggacgtgcgggagaatcccggttgtccaaaggctgcttttcccacaaatctataccctagaccagtgcgatgtgggaagtgccttaggtgggaaccttgggccggctatttatatgggtgtcaaagtggctgtagttgggccttggcccactccagccgggggccggaaagcgaaatcgcactgatataatgttaccagtgcgatttctctttccgagcgcgatagcgcgaggcgccgggttccgcgtaccttctacgctgggtcgcctttatgtgtgatgggacgtaaggggggattcccattaatttattagtgcgctccatgacatcggggg

SEQ ID NO: 619 - DNA, 2843 bp, Rice latent virus 2
  source 1..2843: mol_type = genomic DNA
atgtggatggaaagcggacacctaccgcaggtagggtatcaggtgcaaccttctccgccggccgtaacctcgacgttcgttggaaacgacggcgcctggaggtttctcgttttattgaccgcttgttcttgcctagcaggggcagccgtattcgcatgctggcgcatgtgtggtaaggacttgctcctgaccttgaaggcgaagcgtagcaggacgataaccgagctaggtttcggccagacgcctgaacagcgtcgagctggaacgagttctcaaccagtgggcgtcatcggctaacgatcgaggtggagtctggtcttttgggtctggtcagcgtcccagttggccctctagcccggcacggatgccggcgaggactggtagcgctcgtcgtaaacggaaggatgattgggcgtgggattcggccactcgtcgccgtgttcgtccgaggacgtcttatgttccccgtggtggtccgcgagttcgcaggcctagcctgcagtatgtgaatccggggttacttggttccaccgcggtacatgtggctgatacgaatggggaggttagaattataacaggatactcgcgcgggagcgacgagcagtcgcgtcataccaacgagactataacgtacaagttatcactggacctctatgtcacggtggacacagagtgccagaaatatgttggtaaaggcgttgcggtcgcatggttggtctacgatgcgcagcctacaggagagatgccggcagcatcgacaatattcccccatgttgcggatatggctactgcgccctgtacctggaaggtgggtagggaggtctgccatcgtttcgtggttaagcgtagatgggtgatcacgcttgagactaacgggcgtgtagccggtacggtctttcagggtgctaatggtgtcccaccatgtaatcgcacggtgtacttccataagttctgcaagagactcggtgtcagaactgagtggaagaacacctccggtggttcgatcggagacattaagacgggtgcccctgtacatagtgttcgcggcagggaaccagattaattacagagttcagggggttgtaagaaagtacttcaagtctgtgggtaaccagtaaaacggttacatgtaaaatagtttgtaataaaatgtcaattttattcattacaatacaggtggctgcgctaagcagctgttttgcaatacatacacactttacccaattatccctgggcggcgcgcggcgataagggaaaggggtaaacactaaacacgagactgaccttagttaacatctttccggcgctgttgcgccggtgtctgatataaagctgaaattatatagactcatattaaatatgatgcagttgctctcgaagtacgagagctgttcagcagtcattgctttaggccagtcgtcgtcatcgttaacgatgacaattgaagggattcctcctttgatgagcttctttttcccgtatttcggattaacggtgtaatccttctgagctccgacgagggccttccagcaaggacagaacttgaagggtatatcatctattatattatatagagcttcgggatcatacatcccgaagtctacgttattctggtagtaattgtgtctgccgaggcttctagcccaagtagactttcctgtccttgatggtccgcagatgtagaggctgattggtctcgcctgcttgcaaagcatgtatcatgtagccatcgtagatctgcctcagcgtcagaatgaggatggagcaacgaatatacctgcggggttacatggtagatgttctcggcagcccattctgtgagtgtttcatggcaatgaaacatggagtcattgaacggtggttcatatgttaccggtggatcaggaaatagcttctgagaagcatactcccaggcttgcagcctggcgcagtagtcgtacggaaaccacttcttgaccccgttcatgtactccatccttgaggtcgccgagcgtaggatgtcagccattatctggtctttagtcattcttcgtcgcttgttggccagctcggaggaggtgttacctccctcggccgagctggaggaatccccagcagctctcctaatcgtcgtagaaggtccagcctctccattcccagtcggaggaactccgaatgatcctcggggccgaaaggagcccttatgccattctcctgtaggatgtttgagaatataagccagtacagctttagggtttcttgtaccttgtatatttggatgataatccatattatcaaaaaaacttgagtcatgtgtgcgaatgcgatgacgagtctgagcaagagcatggagatggggagtcccatctttatgaagctcagaagcacataaaacgccgtaaggcctgagcagattccagaggaataagcccattgtatgaggctcttggctacatcgtggataagtgaggaagacatttttgttctggaaggcaaagttatgtggttgctcagatgcggattcagtgttggtcatagggttccaacacttagccgcaaaaccgaactccggtgttttactctctagaaccctcttacaggcgatacccgaacgacccaggcttgggccaatttatagttggccggggtttctttgccggcccataccgaggccaaaggggatcgccaccgcataatattacagcgatcccctttgggccgaggggacattcgtgcgctctgattgtccccgaggccttcgcaattaagcatctactttaataaagtgatagtgaaattacgcggtattgcgtgttatccacgccctagtggactacataagtgaggtctttgggctttgttgg

SEQ ID NO: 620 - protein, 679 aa, Horseradish latent virus
MKPQPLKTMEHLLQKTQIQTEQVMNITNPNSIYIRGRLYFSGYKIVELDCFVDTGASLCIASKHVIPEERWEAAPRKINVKIANESTITLDKICRNLDIIIAGERFHIDVVFQQESGIDFIIGNNFCQEYSPFIQFTGHIVFTMKDQYQVPITKLRRAFKRGIPGFLESMKKRSTAQQPEPLNISTNKTVSLSRGRRFGEKLRITQERMVKIEELLEKVCSENPLDPEKSKGWMQASIKLSDPTKVIKVKPMKYSPMDREEFEKQIQELLDLKVIRPSKSPHMAPAFLVNNEAEKRRGKKRMVVNYKAMNDATVGDAYNLPNKDELLTLIRGKKIFSSFDCKSGFWQVRLDEESKSLTAFTCPQGHYEWNVVPFGMKQAPSIFQRHMDEAFKVFRKFCCIYVDDILVFSDNEQNHQLHVAMILQKCYQHGIILSKKKAQLFKERINFLGLEIDQGTHRPQSHILEHIQKFPDIIESKLQLQRFLGVLTYASDYIPKLAQIRKPLQAKLKENVQWRWTPEDTLYMKKVKKNLNGFPPLHHPLPEEKLIIETDASDNYWGGILKAIHIDLSTNESIELVCRYASGSFKPAEQNYHSNDKETLAVIRTIQKFSIYLTPVRFLVRTDNTHFKYFLNINYKGDSKMGRNIRWQGWLQNYVFDVDHIKGTNNCLADFLSREFNGA

SEQ ID NO: 621 - protein, 358 aa, Bean latent virus
MPLPKRFRLNAKNYFLTYPQCSISKEEALSQLQRLTTPVNKKFIKICRETHEDGQPHLHVLIQFEGKYQCSNNRFFDLVSTTRSAHFHPNIQGAKSSSDVKSYIDKDGDTIEWGEFQIDGRSARGGQQSANDTYAKALNAGSAEAALQIIKEEQPQHFFLQYHNLVSNATRIFQKPPEPWVPPFPQSSFNNVPLDMQQWADDYFGRGAAARTERPISIIIEGDSRTGKTMWARSLGSHNYLSGHLDFNSFVYSNNVDYNVIDDVAPQYLKMKHWKELIGAQKNWQTNCKYGKPVQIKGGIPSIVLCNPGEGASYKDYLDRQENAHLKAWTLHNAKFIFLNSPLYQTSAPVCKTQGSPT

SEQ ID NO: 622 - protein, 354 aa, Rice latent virus 1
MADPSTSHQFSVRTKYFFLTYPKCPVDPWELLHYLLTLLHSRVPIYILVTRESHKDGSFHLHTLLQLSNRLETKDSRFFDYQSYHPNCQPAQNCKQVRDYITKPGTVSIAEWGEFYNAKPFSKKTLKRRAPGSDTKDTKMRKIISSSTSKTEYLSMVRQTFPFDWATRLAQFEYSAEKLFPTTVTPYASSVPTDQLRCSEQLSQWATENIKTYTVCEEDAPTTARRYTSLYVCGPTRTGKTTWARSLGKHNYWNGLVDFTTYDPTAQYNVIDDIPFKYCPNWKQLIGCHRDYTVNPKYGKRKVISGGIPSIVLVNEDEDWLSQCTPAQTKYIESNCVIHYMYEGDSFFKHPSGA

SEQ ID NO: 623 - protein, 382 aa, Rice latent virus 2
MTNTESASEQPHNFAFQNKNVFLTYPRCSQEPHTMGLFLWNLLRPYGVLCASELHKDGTPHLHALAQTRHRIRTHDSSFFDNMDYHPNIQGTRNPKAVLAYILKHPTGEWHKGSFRPRGSFGVPPTGNGEAGPSTTIRRAAGDSSSSAEGGNTSSELANKRRRMTKDQIMADILRSATSRMEYMNGVKKWFPYDYCARLQAWEYASQKLFPDPPVTYEPPFNDSMFHCHETLTEWAAENIYHVTPQARPISLYICGPSRTGKSTWARSLGRHNYYQNNVDFGMYDPEALYNIIDDIPFKFCPCWKALVGAQKDYTVNPKYGKKKLIKGGIPSIVIVNDDDDWPKAMTAEQLSYFESNCIIFNMSLYNFSFISDTGATAPERC

SEQ ID NO: 624 - DNA, 2040 bp, Horseradish latent virus
  source 1..2040: mol_type = genomic DNA
atgaaacctcaacctctgaagacgatggaacatctacttcagaagactcagattcagactgagcaggtgatgaacatcaccaacccaaactcgatttacatccgaggaaggctatacttctcaggatacaagatcgtggagctcgactgtttcgtagatacaggagcaagtctgtgtattgcaagcaaacacgtaataccagaagaaagatgggaagcagctcccagaaagatcaacgtgaagatcgccaatgaaagcacgatcacgctcgataagatatgtcgtaacctcgacatcatcattgccggagaacgattccacattgacgtcgtcttccagcaagaaagcggtatcgacttcatcatcggtaataacttctgtcaggagtactctcctttcatacagttcacaggacacattgtgttcacgatgaaagatcaataccaagtaccaatcacgaagctccgacgagctttcaagagaggaattcctggatttttagaatccatgaagaagagatcaacggctcaacaacctgaaccgctcaacatctctacaaataaaaccgtttcactttcaagggggaggaggtttggagaaaaactcagaatcacccaagaaaggatggtaaaaatcgaagaactacttgaaaaagtttgttctgagaacccattggacccagagaagtccaaaggatggatgcaagccagcatcaaactatcggatcccacgaaggttatcaaggttaaacccatgaaatatagcccaatggaccgagaagaatttgagaagcaaattcaagaattactggacctcaaggtaatcaggcccagtaaaagcccacatatggcaccagcgttcttagtcaacaacgaagctgagaaacgcagaggaaagaagcgtatggtggtcaactacaaagcaatgaatgatgcgactgtaggcgacgcatacaatcttcccaacaaggatgaactccttacgctcatcagaggaaagaaaatcttctcttcctttgactgcaaatcaggattctggcaagttaggcttgacgaagaatcaaaatccttaacggcgtttacatgcccacaaggacactatgagtggaacgtggtccccttcggcatgaagcaggcaccatcgatattccaaagacacatggatgaagcattcaaagtgtttaggaagttctgctgcatatacgttgacgacatcctcgtcttcagcgacaacgagcagaatcatcaacttcatgttgcgatgattctccagaaatgctatcaacatggcatcatactttccaagaagaaagcacagctcttcaaagaaagaatcaacttccttggcctggagatagatcaaggaacgcatagacctcaatcgcatatcttggaacacatccaaaagttcccagatatcattgaaagcaagctacagcttcaacgattcctcggagtactaacatacgcctccgactacatcccgaagctagctcaaatccgaaagcctctgcaagccaagctcaaggaaaacgttcaatggagatggactcctgaggacacattatacatgaagaaggttaaaaagaatctcaacggattccctcctcttcatcatccccttccagaagagaagctgattatcgagaccgatgcatcagacaactactggggaggtattctcaaagctattcatatagatttatctactaacgaatctattgaattagtttgcagatatgcatcaggcagcttcaaacctgctgagcaaaattaccatagcaacgataaagaaacgcttgcggtaataagaactattcaaaagttcagtatttatctgacaccggtaagatttctggtaagaacagataatacgcactttaagtatttccttaatattaattataaaggagattctaaaatgggtagaaatatccgatggcaaggttggttgcaaaactatgtctttgatgttgaccacattaaaggcactaacaattgcctcgcagattttttatcaagggaattcaatggagcttag

SEQ ID NO: 625 - DNA, 1077 bp, Bean latent virus
  source 1..1077: mol_type = genomic DNA
atgccactcccgaaacgctttcgcttaaatgccaagaactacttcctcacatatcctcagtgttccatatccaaagaagaggcattatcacaattacaacgtctaacaactccagttaacaagaagtttatcaagatatgcagagaaacacatgaagatgggcaacctcatctacacgtgcttatccagttcgaagggaaataccaatgttcaaataacagattcttcgacctggtctccacaaccaggtcagcacatttccatccgaacatacagggagctaaatccagctccgatgtcaagtcctacatcgacaaggatggagatacaattgaatggggagagttccaaatcgacggcagatctgctagaggaggtcagcaatctgctaacgacacatacgcgaaggcattaaatgcaggttctgcagaagcggctctgcagataatcaaggaagaacaacctcaacatttcttccttcaatatcataatctggtctcaaacgcaacaaggatattccaaaaacccccggaaccatgggttcctccatttccacaatcgtcgttcaacaacgttccactggatatgcaacaatgggctgacgattatttcggaaggggtgccgctgcgcggacagagagacctattagtatcatcattgaaggtgattcaagaactggaaaaacaatgtgggcacgttcattaggttctcataattacttgagtggacacctggatttcaattcttttgtctattcaaataatgtagattacaacgtcattgatgacgtcgctccacaatacttaaagatgaagcactggaaagagcttatcggggcccaaaagaattggcaaacaaattgcaagtacggaaagccagttcaaattaaaggtggtatcccatcaattgtgctttgcaatccaggagagggggcgagttataaagactacttggatagacaagagaatgcacatctaaaagcgtggacgcttcataatgcgaaattcatcttcctcaactcccccctctatcaaacctcagcaccggtttgcaaaacgcagggcagtccgacgtag

SEQ ID NO: 626 - DNA, 1065 bp, Rice latent virus 1
  source 1..1065: mol_type = genomic DNA
atggccgatccctccacttcccaccaattcagcgtacggaccaagtacttcttcctcacctatcctaagtgtcctgttgatccttgggaactccttcactatcttcttactctgctccacagtcgtgtacctatctacatacttgttactcgtgagagtcacaaagatggatcctttcacctacacacccttttacagctatctaaccgcctggagaccaaagactctaggttttttgactatcagtcttatcatcctaactgtcagcctgctcagaactgcaagcaggtcagagactacatcaccaagccgggaaccgtcagtattgcagaatggggcgaattctacaacgccaaaccgttcagcaagaagaccctcaagaggagggcccctggatctgacaccaaggacaccaagatgaggaaaatcatctcctcgtccacctcgaaaacagagtacctctctatggtacgccagacattccccttcgactgggcaactaggctggcccagttcgagtacagcgcagagaagctcttccccaccaccgtaactccatacgcaagctctgtccccactgatcagctacgttgcagcgaacagctgagtcagtgggccacagagaacataaagacatacacggtatgtgaagaagatgctccaacaaccgccagaagatatacctccctatatgtatgcggaccaacccgaacaggaaagacaacctgggcaagaagcctcgggaagcacaactattggaacggactggtggacttcaccacttatgaccccaccgcacaatacaatgttatagacgacatcccgttcaagtactgccctaattggaagcagctaatcggatgtcaccgtgactacaccgtcaatcctaagtacggcaagcggaaggtaataagtggtgggatcccctccatcgtcctggtaaatgaagacgaagactggctgagtcaatgtacaccggctcagaccaagtacatcgaaagcaactgcgtgatacattacatgtatgaaggggatagtttcttcaagcacccttcgggtgcttag

SEQ ID NO: 627 - DNA, 1149 bp, Rice latent virus 2
  source 1..1149: mol_type = genomic DNA
atgaccaacactgaatccgcatctgagcaaccacataactttgccttccagaacaaaaatgtcttcctcacttatccacgatgtagccaagagcctcatacaatgggcttattcctctggaatctgctcaggccttacggcgttttatgtgcttctgagcttcataaagatgggactccccatctccatgctcttgctcagactcgtcatcgcattcgcacacatgactcaagtttttttgataatatggattatcatccaaatatacaaggtacaagaaaccctaaagctgtactggcttatattctcaaacatcctacaggagaatggcataagggctcctttcggccccgaggatcattcggagttcctccgactgggaatggagaggctggaccttctacgacgattaggagagctgctggggattcctccagctcggccgagggaggtaacacctcctccgagctggccaacaagcgacgaagaatgactaaagaccagataatggctgacatcctacgctcggcgacctcaaggatggagtacatgaacggggtcaagaagtggtttccgtacgactactgcgccaggctgcaagcctgggagtatgcttctcagaagctatttcctgatccaccggtaacatatgaaccaccgttcaatgactccatgtttcattgccatgaaacactcacagaatgggctgccgagaacatctaccatgtaaccccgcaggcgagaccaatcagcctctacatctgcggaccatcaaggacaggaaagtctacttgggctagaagcctcggcagacacaattactaccagaataacgtagacttcgggatgtatgatcccgaagctctatataatataatagatgatatacccttcaagttctgtccttgctggaaggccctcgtcggagctcagaaggattacaccgttaatccgaaatacgggaaaaagaagctcatcaaaggaggaatcccttcaattgtcatcgttaacgatgacgacgactggcctaaagcaatgactgctgaacagctctcgtacttcgagagcaactgcatcatatttaatatgagtctatataatttcagctttatatcagacaccggcgcaacagcgccggaaagatgttaa

SEQ ID NO: 628 - DNA, 38 bp, synthetic construct
  source 1..38: mol_type = other DNA
ccactggattcagcgaagttatgcgtaaaggcgaagag

SEQ ID NO: 629 - DNA, 20 bp, synthetic construct
  source 1..20: mol_type = other DNA
ctgagtccagctacgagcag

SEQ ID NO: 630 - DNA, 19 bp, synthetic construct
  source 1..19: mol_type = other DNA
ccactggattcagcgaagt

SEQ ID NO: 631 - DNA, 21 bp, synthetic construct
  source 1..21: mol_type = other DNA
aacttcagcgtcagtttacca

SEQ ID NO: 632 - DNA, 23 bp, synthetic construct
  source 1..23: mol_type = other DNA
  misc_feature 1: note = 5' 6-FAM 520 fluorophore
  misc_feature 10: note = internal ZEN quencher
  misc_feature 23: note = 3' Iowa Black FQ quencher
cgagggtgaaggtgacgcaacta

SEQ ID NO: 633 - DNA, 20 bp, synthetic construct
  source 1..20: mol_type = other DNA
cctgctgtccatctgctctc

SEQ ID NO: 634 - DNA, 20 bp, synthetic construct
  source 1..20: mol_type = other DNA
ctgagtccagctacgagcag

SEQ ID NO: 635 - DNA, 20 bp, synthetic construct
  source 1..20: mol_type = other DNA
  misc_feature 1: note = 5' SUN 554 fluorophore
  misc_feature 10: note = Internal ZEN quencher
  misc_feature 20: note = 3' Iowa Black FQ quencher
acaagactgacagggccaaa